(19) United States
(12) Patent Application Publication
(10) Pub. No.: US 2022/0257796 A1
(43) Pub. Date: Aug. 18, 2022

(54) RECOMBINANT AD35 VECTORS AND RELATED GENE THERAPY IMPROVEMENTS

(71) Applicants: Fred Hutchinson Cancer Research Center, Seattle, WA (US); University of Washington, Seattle, WA (US)

(72) Inventors: Hans-Peter Kiem, Seattle, WA (US); Andre Lieber, Seattle, WA (US); Chang Li, Seattle, WA (US); Hongjie Wang, Seattle, WA (US)

(73) Assignees: Fred Hutchinson Cancer Research Center, Seattle, WA (US); University of Washington, Seattle, WA (US)

(21) Appl. No.: 17/618,774

(22) PCT Filed: Jul. 2, 2020
(86) PCT No.: PCT/US2020/040756

§ 371 Date: Dec. 13, 2021

Related U.S. Application Data
(60) Provisional application No. 62/869,907, filed on Jul. 2, 2019.
(60) Provisional application No. 62/935,507, filed on Nov. 14, 2019.
(60) Provisional application No. 63/009,385, filed on Apr. 13, 2020.

(51) Int. Cl. A61K 48/00; C12N 15/11; C12N 15/113; C12N 15/90; C12N 15/86; C12N 9/22

(52) U.S. Cl. CPC A61K 48/0091; C12N 15/111; C12N 15/113; C12N 15/907; C12N 2800/90; C12N 9/22; C12N 2310/20; C12N 2710/10343; C12N 2800/80; C12N 15/86

(57) ABSTRACT

The present disclosure provides, among other things, helper-dependent adenoviral serotype 35 (Ad35) vectors. In various embodiments, helper-dependent Ad35 vectors can be used to deliver a therapeutic payload to a subject in need thereof. Exemplary payloads can encode replacement proteins, antibodies, CARs, TCRs, small RNAs, and genome editing systems. In certain embodiments, a helper-dependent Ad35 vector is engineered for integration of a payload into a host cell genome. The present disclosure further includes methods of gene therapy that include administration of a helper-dependent Ad35 vector to a subject in need thereof.

### CROSS-REFERENCE TO RELATED APPLICATIONS

[0001] This is the U.S. National Phase of International Patent Application no. PCT/US2020/040756, filed Jul. 2, 2020, which claims priority to and the benefit of the earlier filing date of U.S. Provisional Application No. 62/869,907, filed Jul. 2, 2019, U.S. Provisional Application No. 62/935,507, filed Nov. 14, 2019, and U.S. Provisional Application No. 63/009,385, filed Apr. 13, 2020, the disclosure of each of which is hereby incorporated by reference in its entirety.

### GOVERNMENT SUPPORT

[0002] This invention was made with government support under grant numbers HL130040, HL141781, CA204036, HL128288, and HL136135 awarded by the National Institutes of Health. The government has certain rights in the invention.

### STATEMENT REGARDING SEQUENCE LISTING

[0003] The Sequence Listing associated with this application is provided in text format in lieu of a paper copy and is hereby incorporated by reference into the specification. The name of the text file containing the Sequence Listing is 2LX4116.txt. The text file is 980 KB, was created on Dec. 10, 2021, and is being submitted electronically via EFS-Web.

### BACKGROUND

[0004] Many medical conditions are caused by genetic mutation and/or are treatable, at least in part, by gene therapy. Such conditions include, for example, hemoglobinopathies, immune deficiencies, and cancers. Genetic disorders known as hemoglobinopathies are among the most prevalent types of genetic disorders worldwide, with significantly reduced survival rates among patients born in underdeveloped countries. Examples of hemoglobinopathies include sickle-cell disease and thalassemia. Immune deficiencies can be primary or secondary. More than 80 primary immune deficiency diseases are recognized by the World Health Organization. Prophylactic and therapeutic treatments for medical conditions caused by genetic mutation and/or treatable, at least in part, by gene therapy are needed.

### SUMMARY

[0005] Gene therapy can treat many conditions that have a genetic component, including without limitation hemoglobinopathies, immune deficiencies, and cancers. While molecular biology includes various tools for genetic engineering, application of those tools in the gene therapy context, e.g., ex vivo and in vivo, raises new opportunities and challenges, relating at least in part to development of genetic constructs for use in gene therapy vectors, as well as development of the vectors themselves.

[0006] The present disclosure includes, among other things, adenoviral vectors and adenoviral genomes (e.g., “recombinant” or “engineered” adenoviral vectors and adenoviral genomes) for expression of base editors in target cells. The present disclosure includes, among other things, adenoviral vectors and adenoviral genomes for expression of a CRISPR system including CRISPR enzyme that is a CRISPR-associated RNA-guided endonuclease and/or a guide RNA (gRNA) in target cells, optionally wherein expression of at least one component of the CRISPR system is self-inactivating. The present disclosure includes, among other things, adenoviral vectors and adenoviral genomes for expression of a base editing system including base editing enzyme and/or a guide RNA (gRNA) in target cells, optionally wherein expression of at least one component of the base editing system is self-inactivating. The present disclosure includes, among other things, adenoviral vectors and adenoviral genomes that include a regulatory sequence that directs expression of an expression product (e.g., a therapeutic expression product) in target cells, where the regulatory sequence includes an miRNA binding site or where the regulatory sequence includes a β-globin locus control region (LCR), such as a β-globin Long LCR. The present disclosure includes, among other things, combination adenoviral vectors and adenoviral genomes that express a plurality of therapeutic expression products in target cells, e.g., therapeutic expression products that together contribute to treatment of a disease or condition. The present disclosure includes, among other things, adenoviral vectors and adenoviral genomes for integration into a target cell genome of a payload including a β-globin Long LCR. The present disclosure includes, among other things, adenoviral vectors, and adenoviral genomes thereof, that have reduced immunogenicity relative to certain existing vectors (e.g., relative to Ad5 vectors). The present disclosure includes, among other things, Ad35 adenoviral vectors, Ad35 adenoviral genomes, HDAd35 adenoviral vectors, HDAd35 adenoviral genomes, support vectors, support genomes, Ad35 helper vectors, and ad Ad35 helper genomes, where HDAd35 vectors can have reduced immunogenicity relative to certain existing vectors (e.g., relative to Ad5 vectors or Ad5/35 vectors).

[0007] The current disclosure describes, among other things, recombinant Ad35 vectors targeting CD46 for in vivo gene editing of hematopoietic stem cells and related gene therapy improvements. In particular embodiments of presently disclosed vector designs, all proteins are derived from serotype 35. In particular embodiments of Ad35 vectors described herein, no viral genes remain in the vector. In particular embodiments, the ITR and packaging sequence are derived from Ad35. In particular embodiments, the Ad35 delivery vector has all viral protein encoding genes removed and replaced with components associated with a therapeutic use.

[0008] In particular embodiments, the Ad35 vector is helper-dependent, and the current disclosure also provides newly-designed Ad35 helper vectors. Particular embodiments provide optimized ratios of helper-dependent and transgene plasmid to make Ad35.

[0009] Related gene therapy improvements described within the current disclosure relate to one or more of: (i) novel mutations of the Ad35 knob protein that increase CD46 binding; (ii) vector features allowing for positive selection of in vivo modified cells; (iii) microRNA control systems that modulate expression of therapeutic proteins within clinically relevant time windows; (iv) use of homology arms to facilitate targeted genomic insertion at defined sites; (v) use of CRISPR to inactivate genomic suppressor regions, allowing increased expression of endogenous genes; (vi) use of mobilization strategies to increase delivery of Ad35 vectors to targeted CD46-expressing cells; (vii) use of mini- or long-form locus control regions to increase gene expression; (viii) use of recombinase systems to increase the size of transposons that can be inserted with transposase systems; (ix) steroid delivery (e.g., glucocorticoids, dexamethasone) before vector delivery; and (x) erythrocytes to generate and secrete therapeutic proteins. Each of these related gene therapy improvements can be practiced with Ad35 vectors described herein and can also be utilized with other viral vector delivery systems. As one example, mutated Ad35 knob proteins that increase CD46 binding can be utilized with a lentiviral or foamy delivery system.

[0010] Advances described herein also relate to (i) in vivo HSC transduction/selection technology for SB100x-mediated transgene addition using HDAd5/35++ vectors; (ii) increased HbF reactivation by simultaneously targeting the erythroid bcl11a-enhancer (e.g., to reduce BCL11A expression) and the HBG1/2 promoter regions (to increase expression of γ-globin); (iii) in vivo CRISPR genome engineering; (iv) correction of thalassemia; (v) combination of γ gene addition and reactivation (SB100x system); (vi) self-inactivation of CRISPR/Cas9; (vii) targeted integration using HDAd as donor vectors with self-releasing cassette; (viii) in vivo HSC gene therapy using erythroid cells as a factory for high-level production of a secreted therapeutic protein; (ix) therapeutic approaches to treat cancer (prophylactically and therapeutically); and (x) HDAd35++ vectors.

[0011] Certain embodiments relate to mutated knob proteins that increase targeted binding to CD46, allowing for more targeted and specific delivery of therapeutic genes.

[0012] Certain embodiments relate to use of homology arms to facilitate targeted genomic insertion, which can be used to provide chromosomal integration into genomic safe harbors, typically open chromatin which allows for higher expression of the transgene levels. As described herein, in particular embodiments, 1.8 b homology arms work well, with 0.8 as a lower limit. Single nucleotide polymorphisms can begin to impact integration at greater than 1.8 b homology arms.

[0013] Certain embodiments relate to use of mobilization regimens to alleviate the need for conditioning.

[0014] Particular embodiments provide an Ad35 in vivo gene therapy, with (i) an MGMT^{P140K} system that allows for increasing the therapeutic effect by short-term treatment with low-dose O⁶-benzylguanine plus bis-chloroethylnitrosourea, (ii) SB100X transposase-based integration machinery, and (iii) a micro-LCR-driven γ-globin gene.

[0015] Particular embodiments include an Ad35 adenovirus vector (HDAd-comb) including (i) a CRISPR/Cas9 cassette targeting the BCL11A binding site within the HBG1/2 promoters to reverse suppression of endogenous genes, (ii) a γ-globin gene cassette driven by a 5 kb β-globin mini-LCR, and an EF1α-MGMT^{P140K} expression cassette allowing for in vivo selection of transduced cells with the latter two cassettes flanked by FRT and transposon sites.

[0016] Particular embodiments describe CRISPR/Cas9-mediated genome editing approaches in adult CD34+ cells aimed toward the reactivation of fetal γ-globin expression in red blood cells. Because models involving erythroid differentiation of CD34+ cells have limitations in assessing γ-globin reactivation, human β-globin locus-transgenic, a helper-dependent human CD46-targeting adenovirus vector expressing CRISPR/Cas9 (HDAd-HBG-CRISPR) was used to disrupt a repressor binding region within the γ-globin promoter.

[0017] Particular embodiments provide an integrating CD46 targeted Ad35 vector system: transgene included (i) a β-globin locus control region (LCR) driving expression of a γ globin gene, and (ii) EF1-α (constitutive promoter) driving expression of a MGMT^{P140K} cassette for positive selection of in vivo gene-modified HSC.

[0018] Particular embodiments provide an integrating CD46 targeted Ad35 vector system: transgene included (i) a 21.5 kb (long) human β-globin locus control region (LCR (HS1-HS5)) and a β-globin promoter (1.6 kb), driving expression of a γ globin gene (optionally including its 3′ UTR), and (ii) EF1-α (constitutive promoter) driving expression of a MGMT^{P140K} cassette for positive selection of in vivo gene-modified HSC. Some embodiments can further include a 3′HS1 (human β-globin 3′HS1; 3 kb, e.g., where 3′HS1 has the sequence of positions 5206867-5203839 of chromosome 11). In various embodiments, a 3′HS1 has the following nucleic acid sequence as shown in SEQ ID NO: 287, or a sequence having at least 80% sequence identity to SEQ ID NO: 287, e.g., a sequence having at least 80%, 85%, 90%, 91%, 92%, 93%, 94%, 95%, 96%, 97%, 98%, or 99% A identity to SEQ ID NO: 287. These embodiments can utilize a hyperactive transposase (e.g., SB100X) in combination with a recombinase system (e.g., Flp/Frt; Cre/Lox). Thus, in one particular embodiment, an Ad35 vector system can include, e.g., a transposable transgene insert including a long human β-globin locus control region (21.5 kb), a human β-globin promoter (1.6 kb), a human γ globin gene together with its 3′ UTR (2.7 kb), a human β-globin 3′ UTR, and a 3′HS1 (3 kb). A transposable transgene insert can further include, e.g., EF1-α (constitutive promoter) driving expression of a MGMT^{P140K}. In various embodiments, an Ad35 vector system can include, e.g., a transposable transgene insert of 32.4 kb.

[0019] Particular embodiments provide miRNA regulation systems that are activated only when HSPCs are recruited to a tumor to control expression of therapeutic transgenes. These features of the disclosure are demonstrated with anti PDL1-γ1 as a transgene. These systems can be used to regulate expression of therapeutic transgene in the context of the tumor microenvironment.

[0020] In various embodiments, a microRNA control system can refer to a method or composition in which expression of a gene is regulated by the presence of microRNA sites (e.g., nucleic acid sequences with which a microRNA can interact), an example of which has been provided in Example 5. In particular embodiments, a microRNA control system regulated expression of a gene such that the gene is expressed exclusively in target cells, such as HSPCs e.g., tumor infiltrating HSPCs. In some embodiments, a nucleic acid (e.g., a therapeutic gene) encoding a protein or nucleic acid of interest (e.g., an anti-cancer agent such as a CAR, TCR, antibody, and/or checkpoint inhibitor, e.g., an αPD-L1 antibody (e.g., an αPD-L1γ1 antibody) that is a checkpoint inhibitor) includes, is associated with, or is operably linked with a microRNA site, a plurality of same microRNA sites, or a plurality of distinct microRNA sites. While those of skill in the art will be familiar with means and techniques of associating a microRNA site with a nucleic acid or portion thereof having a sequence that encodes a gene of interest, certain non-limiting examples are provided herein. For example, a gene of interest (e.g., a sequence encoding an αPD-L1γ1 antibody) can be present in a nucleic acid such that expression of the gene of interest is regulated by the presence of one or more microRNA sites that suppress expression in cells that are not tumor-infiltrating leukocyte cells, but do not suppressed expression in tumor-infiltrating leukocytes. In certain particular examples, a gene of interest (e.g., a sequence encoding an αPD-L1γ1 antibody) can be present in a nucleic acid such that expression of the gene of interest is regulated by the presence of one or more miR423-5p microRNA sites that suppress expression in cells that are not tumor-infiltrating leukocyte cells, but do not suppressed expression in tumor-infiltrating leukocytes. In various embodiments, a microRNA control system can include a nucleic acid that includes, or in which expression of a protein or nucleic acid of interest is regulated by, one or more microRNA sites, e.g., 1, 2, 3, 4, 5, 6, 7, 8, 9, 10, or more microRNA sites. In various embodiments, a microRNA control system can include a nucleic acid that includes, or in which expression of a protein or nucleic acid of interest is regulated by, one or more miR423-5p microRNA sites, e.g., 1, 2, 3, 4, 5, 6, 7, 8, 9, 10, or more miR423-5p microRNA sites. In some particular embodiments, a microRNA control system can include a nucleic acid that encodes αPD-L1γ1 antibody and includes, or in which expression of αPD-L1γ1 antibody is regulated by, one or more miR423-5p microRNA sites, e.g., 1, 2, 3, 4, 5, 6, 7, 8, 9, 10, or more miR423-5p microRNA sites, e.g., miR423-5p microRNA sites.

[0021] The current disclosure describes recombinant Ad35 vectors targeting CD46 for in vivo gene editing of hematopoietic stem cells and related gene therapy improvements. In particular embodiments, the Ad35 delivery vector has all viral protein encoding genes removed and replaced with components associated with a therapeutic use. Removal of all genes encoding viral proteins provides a vector carrying capacity of 30 kb, significantly more space than is available with other viral vector delivery platforms. In particular embodiments, the Ad35 vector is helper-dependent, and the current disclosure also provides newly-designed Ad35 helper vectors. For the avoidance of doubt, the term “gene editing” as used herein includes, without limitation, any use of a vector or agent to modify a nucleic acid sequence.

[0022] Further provided herein are vectors that are or include nucleic acids provided herein, including without limitation microRNA control systems and other nucleic acids including microRNA (also referred to herein as miRNA) sites (also referred to herein as target sites) disclosed herein, and/or encode an agent disclosed herein, including without limitation an antibody such as an αPD-L1 antibody (e.g., an αPD-L1γ1 antibody). In any of the various embodiments of the present disclosure, a vector can be an Ad5/35 vector, optionally wherein the Ad5/35 vector is a helper-dependent Ad5/35 (HDAd5/35). In any of the various embodiments of the present disclosure, a vector can be an Ad5/35 vector (e.g., HDAd5/35 vector) including variations (e.g., amino acid mutations) provided herein, certain of which such vectors can be designated as Ad5/35++ (e.g., HDAd5/35++). For the avoidance of doubt, it is intended that those of skill in the art appreciate from the present disclosure that any embodiment using any vector, including embodiments in which a vector other than an Ad5/35 (e.g., other than Ad5/35++ or other than HDAd5/35++) vector is specified, is to be specifically read as disclosing, in addition to such vectors as stated in the relevant text, a vector that is an Ad5/35 vector (including, e.g., any of HDAd5/35, Ad5/35++, and HDAd5/35++ vector).

[0023] In any of the various embodiments of the present disclosure, a vector can be an Ad35 vector, optionally wherein the Ad35 vector is a HDAd35. In any of the various embodiments of the present disclosure, a vector can be an Ad35 vector (e.g., HDAd35 vector) including variations (e.g., amino acid mutations) provided herein, certain of which such vectors can be designated as Ad35++ (e.g., HDAd35++). For the avoidance of doubt, it is intended that those of skill in the art appreciate from the present disclosure that any embodiment using any vector, including embodiments in which a vector other than an Ad35 (e.g., other than Ad35++ or other than HDAd35++) vector is specified, is to be specifically read as disclosing, in addition to such vectors as stated in the relevant text, a vector that is an Ad35 vector (including, e.g., any of HDAd35, Ad35++, and HDAd35++ vector).

[0024] As indicated, the vectors described herein have many uses including in the treatment of sickle cell disease, γ globin gene addition and reactivation, and the targeting of multiple target sites for γ globin reactivation. Further, in addition to factor VIII (FVIII), the application of disclosed approaches can be used for other secreted proteins, including for example: (i) other coagulation factors, specifically FXI, FVII, von Willebrand factor (VWF), and rare clotting factors (i.e. factors I, II, V, X, XI, or XIII); (ii) enzymes that are currently used for Enzyme replacement therapies (ERT) for lysosomal storage diseases (taking advantage of the cross-correction mechanism) like Pompe disease (acid alpha (α)-glucosidase), Gaucher disease (glucocerebrosidase), Fabry disease (α-galactosidase A), and Mucopolysaccharidosis type I (α-L-Iduronidase); (iii) immunodeficiencies (e.g. SCID-ADA (adenosine deaminase)); (iv) cardiovascular diseases, e.g. familial apolipoprotein E deficiency and atherosclerosis (ApoE); (v) viral infections by expression of viral decoy receptors (e.g. for HIV-soluble CD4, or broadly neutralizing antibodies (bNAbs)) for HIV, chronic HCV, or HBV infections; (vi) cancer (e.g. controlled expression of monoclonal antibodies (e.g. trastuzumab) or checkpoint inhibitors (e.g. αPDL1) or protection of HSCs in order to permit therapeutic doses of chemotherapy and (vii) FANCA genes for Fanconi anemia; (viii) a coagulation factor deficiency optionally selected from hemophilia A, hemophilia B, or Von Willebrand Disease, (ix) a platelet disorder, (x) anemia, (xi) alpha-1 antitrypsin deficiency, or (xii) an immune deficiency. Other additional uses are described in more detail elsewhere herein.

[0025] Thus, one embodiment provides a recombinant serotype 35 adenovirus (Ad35) vector targeting CD46 for in vivo gene editing of hematopoietic stem cells.

[0026] Another embodiment is an erythrocyte genetically modified to express a therapeutic protein. By way of example, the therapeutic protein in some cases includes a coagulation factor or a protein that blocks or reduces viral infection. Optionally, the erythrocyte secretes the therapeutic protein.

[0027] Also provided are uses of the recombinant Ad35 vectors or erythrocytes described herein. These uses include to increase HbF reactivation by simultaneously targeting the erythroid bcl11a-enhancer and the HBG promoter regions; fora combination of γ-globin gene addition and endogenous γ-globin gene reactivation; for in vivo CRISPR genome engineering; to provide a therapeutic gene; to treat a (i) hemoglobinopathy, (ii) Fanconi anemia, (iii) a coagulation factor deficiency optionally selected from hemophilia A, hemophilia B, or Von Willebrand Disease, (iv) a platelet disorder, (v) anemia, (vi) alpha-1 antitrypsin deficiency, or (v) an immune deficiency; to treat thalassemia; to treat cancer, prevent or delay cancer recurrence or prevent or delay cancer onset in carriers of high-risk germ-line mutations, optionally wherein the cancer is breast cancer or ovarian cancer; for self-inactivation of CRISPR/Cas9; and for targeted integration using HDAd as donor vectors with a self-releasing cassette. Any of these uses may optionally include mobilization, for instance wherein the mobilization includes administration of Gro-beta, GM-CSF, S-CSF, and/or AMD3100.

[0028] Yet another use embodiment is use of any of the recombinant Ad35 vectors or erythrocytes described herein which includes administering a steroid (e.g., a glucocorticoid or dexamethasone), an IL-6 receptor antagonist, and/or an IL-1R receptor antagonist to a subject receiving the Ad35 vector and/or erythrocyte.

[0029] Also provided are use embodiments employing any of the recombinant Ad35 vectors or erythrocytes described herein, which include administering O⁶BG and TMZ (temozolomide) or BCNU (Carmustine) to a subject receiving the Ad35 vector and/or erythrocyte. By examples of such uses embodiments, the subject in is receiving O⁶BG and TMZ or BCNU as a treatment for anaplastic astrocytoma, breast cancer, colorectal cancer, diffuse intrinsic brainstem glioma, Ewing sarcoma, glioblastoma multiforme (GBM), malignant glioma, melanoma, metastatic malignant melanoma, nasopharyngeal cancer, or a pediatric cancer.

[0030] Yet another embodiment is a recombinant adenoviral serotype 35 (Ad35) vector production system including: a recombinant Ad35 helper genome including: a nucleic acid sequence encoding an Ad35 fiber shaft; a nucleic acid sequence encoding an Ad35 fiber knob; and recombinase DRs flanking at least a portion of an Ad35 packaging sequence, and a recombinant helper dependent Ad35 donor genome including: a 5′ Ad35 ITR; a 3′ Ad35 ITR; an Ad35 packaging sequence; and a nucleic acid sequence encoding at least one heterologous expression product.

[0031] Also provided are recombinant adenoviral serotype 35 (Ad35) helper vector embodiments that include: an Ad35 fiber shaft; an Ad35 fiber knob; and an Ad35 genome including recombinase DRs flanking at least a portion of an Ad35 packaging sequence.

[0032] Also provided are recombinant Ad35 helper genome embodiments that include: a nucleic acid sequence encoding an Ad35 fiber shaft; a nucleic acid sequence encoding an Ad35 fiber knob; and recombinase DRs flanking at least a portion of an Ad35 packaging sequence.

[0033] Also provided are recombinant helper dependent Ad35 donor vector embodiments that include: a nucleic acid sequence including: a 5′ Ad35 ITR; a 3′ Ad35 ITR; an Ad35 packaging sequence; and a nucleic acid sequence encoding at least one heterologous expression product, wherein the genome does not include a nucleic acid sequence encoding an Ad35 viral structural protein; and an Ad35 fiber shaft and/or an Ad35 fiber knob.

[0034] Also provided are recombinant helper dependent Ad35 donor genome embodiments that include: a 5′ Ad35 ITR; a 3′ Ad35 ITR; an Ad35 packaging sequence; and a nucleic acid sequence encoding at least one heterologous expression product, wherein the Ad35 donor genome does not include a nucleic acid sequence encoding an expression product encoded by the wild-type Ad35 genome.

[0035] Another embodiment is a method of producing a recombinant helper dependent Ad35 donor vector, the method including isolating the recombinant helper dependent Ad35 donor vector from a culture of cells, wherein the cells include: a recombinant Ad35 helper genome including: a nucleic acid sequence encoding an Ad35 fiber shaft; a nucleic acid sequence encoding an Ad35 fiber knob; and recombinase DRs flanking at least a portion of an Ad35 packaging sequence, and a recombinant helper dependent Ad35 donor genome including: a 5′ Ad35 ITR; a 3′ Ad35 ITR; an Ad35 packaging sequence; and a nucleic acid sequence encoding at least one heterologous expression product.

[0036] Also provided are recombinant Ad35 production system embodiments including: a recombinant Ad35 helper genome including: a nucleic acid sequence encoding an Ad35 fiber shaft; a nucleic acid sequence encoding an Ad35 fiber knob; and recombinase DRs within 550 nucleotides of the 5′ end of the Ad35 genome that functionally disrupt the Ad35 packaging signal but not the 5′ Ad35 ITR, and a recombinant Ad35 donor genome including: a 5′ Ad35 ITR; a 3′ Ad35 ITR; an Ad35 packaging sequence; and a nucleic acid sequence encoding at least one heterologous expression product.

[0037] Another embodiment is a recombinant Ad35 helper vector including: an Ad35 fiber shaft; an Ad35 fiber knob; and an Ad35 genome including recombinase DRs within 550 nucleotides of the 5′ end of the Ad35 genome that functionally disrupt the Ad35 packaging signal but not the 5′ Ad35 ITR.

[0038] Another embodiment is a recombinant Ad35 helper genome including: a nucleic acid sequence encoding an Ad35 fiber shaft; a nucleic acid sequence encoding an Ad35 fiber knob; and DRs within 550 nucleotides of the 5′ end of the Ad35 genome that functionally disrupt the Ad35 packaging signal but not the 5′ Ad35 ITR.

[0039] Another embodiment is a method of producing a recombinant helper dependent Ad35 donor vector, the method including isolating the recombinant helper dependent Ad35 donor vector from a culture of cells, wherein the cells include: a recombinant Ad35 helper genome including: a nucleic acid sequence encoding an Ad35 fiber shaft; a nucleic acid sequence encoding an Ad35 fiber knob; and recombinase DRs within 550 nucleotides of the 5′ end of the Ad35 genome that functionally disrupt the Ad35 packaging signal but not the 5′ Ad35 ITR, and a recombinant Ad35 donor genome including: a 5′ Ad35 ITR; a 3′ Ad35 ITR; an Ad35 packaging sequence; and a nucleic acid sequence encoding at least one heterologous expression product.

[0040] Yet another embodiment is a cell including a helper vector, a helper genome, a donor vector, or a donor genome as described herein, optionally wherein the cell is a HEK293 cell.

[0041] Another embodiment is a cell including a donor genome of any one of embodiments described herein, optionally wherein the cell is an erythrocyte, optionally wherein the cell is a hematopoietic stem cell, T-cell, B-cell, or myeloid cell, optionally wherein the cell secretes the expression product.

[0042] Also provided is a method of modifying a cell, the method including contacting the cell with an Ad35 donor vector according to any one of the provided Ad35 donor vector embodiments.

[0043] Also provided is a method of modifying a cell of a subject, the method including administering to the subject an Ad35 donor vector according to any one of the Ad35 donor vector embodiments, optionally wherein the method does not include isolation of the cell from the subject.

[0044] Yet another embodiment is a method of treating a disease or condition in a subject in need thereof, the method including administering to the subject an Ad35 donor vector according to any one of the Ad35 donor vector embodiments provided herein, optionally wherein the administration is intravenous.

### Definitions

[0045] A, An, The: As used herein, “a”, “an”, and “the” refer to one or to more than one (i.e., to at least one) of the grammatical object of the article. By way of example, “an element” discloses embodiments of exactly one element and embodiments including more than one element.

[0046] About: As used herein, term “about”, when used in reference to a value, refers to a value that is similar, in context to the referenced value. In general, those skilled in the art, familiar with the context, will appreciate the relevant degree of variance encompassed by “about” in that context. For example, in some embodiments, the term “about” may encompass a range of values that within 25%, 20%, 19%, 18%, 17%, 16%, 15%, 14%, 13%, 12%, 11%, 10%, 9%, 8%, 7%, 6%, 5%, 4%, 3%, 2%, 1%, or less of the referenced value.

[0047] Administration: As used herein, the term “administration” typically refers to administration of a composition to a subject or system to achieve delivery of an agent that is, or is included in, the composition.

[0048] Adoptive cell therapy: As used herein, “adoptive cell therapy” or “ACT” involves transfer of cells with a therapeutic activity into a subject, e.g., a subject in need of treatment for a condition, disorder, or disease. In some embodiments, ACT includes transfer into a subject of cells after ex vivo and/or in vitro engineering and/or expansion of the cells.

[0049] Affinity: As used herein, “affinity” refers to the strength of the sum total of non-covalent interactions between a particular binding agent (e.g., a viral vector), and/or a binding moiety thereof, with a binding target (e.g., a cell). Unless indicated otherwise, as used herein, “binding affinity” refers to a 1:1 interaction between a binding agent and a binding target thereof (e.g., a viral vector with a target cell of the viral vector). Those of skill in the art appreciate that a change in affinity can be described by comparison to a reference (e.g., increased or decreased relative to a reference), or can be described numerically. Affinity can be measured and/or expressed in a number of ways known in the art, including, but not limited to, equilibrium dissociation constant (K_{D}) and/or equilibrium association constant (K_{A}). K_{D} is the quotient of k_{off}/kₒₙ, whereas K_{A} is the quotient of kₒₙ/k_{off}, where kₒₙ refers to the association rate constant of, e.g., viral vector with target cell, and k_{off} refers to the dissociation of, e.g., viral vector from target cell. The kₒₙ and k_{off} can be determined by techniques known to those of skill in the art.

[0050] Agent. As used herein, the term “agent” may refer to any chemical entity, including without limitation any of one or more of an atom, molecule, compound, amino acid, polypeptide, nucleotide, nucleic acid, protein, protein complex, liquid, solution, saccharide, polysaccharide, lipid, or combination or complex thereof.

[0051] Allogeneic: As used herein, term “allogeneic” refers to any material derived from one subject which is then introduced to another subject, e.g., allogeneic T cell transplantation.

[0052] Between or From: As used herein, the term “between” refers to content that falls between indicated upper and lower, or first and second, boundaries, inclusive of the boundaries. Similarly, the term “from”, when used in the context of a range of values, indicates that the range includes content that falls between indicated upper and lower, or first and second, boundaries, inclusive of the boundaries.

[0053] Binding: As used herein, the term “binding” refers to a non-covalent association between or among two or more agents. “Direct” binding involves physical contact between agents; indirect binding involves physical interaction by way of physical contact with one or more intermediate agents. Binding between two or more agents can occur and/or be assessed in any of a variety of contexts, including where interacting agents are studied in isolation or in the context of more complex systems (e.g., while covalently or otherwise associated with a carrier agents and/or in a biological system or cell).

[0054] Cancer: As used herein, the term “cancer” refers to a condition, disorder, or disease in which cells exhibit relatively abnormal, uncontrolled, and/or autonomous growth, so that they display an abnormally elevated proliferation rate and/or aberrant growth phenotype characterized by a significant loss of control of cell proliferation. In some embodiments, a cancer can include one or more tumors. In some embodiments, a cancer can be or include cells that are precancerous (e.g., benign), malignant, pre-metastatic, metastatic, and/or non-metastatic. In some embodiments, a cancer can be or include a solid tumor. In some embodiments, a cancer can be or include a hematologic tumor.

[0055] Chimeric antigen receptor. As used herein, “Chimeric antigen receptor” or “CAR” refers to an engineered protein that includes (i) an extracellular domain that includes a moiety that binds a target antigen; (ii) a transmembrane domain; and (iii) an intracellular signaling domain that sends activating signals when the CAR is stimulated by binding of the extracellular binding moiety with a target antigen. A T cell that has been genetically engineered to express a chimeric antigen receptor may be referred to as a CAR T cell. Thus, for example, when certain CARs are expressed by a T cell, binding of the CAR extracellular binding moiety with a target antigen can activate the T cell. CARs are also known as chimeric T cell receptors or chimeric immunoreceptors.

[0056] Combination therapy: As used herein, the term “combination therapy” refers to administration to a subject of to two or more agents or regimens such that the two or more agents or regimens together treat a condition, disorder, or disease of the subject. In some embodiments, the two or more therapeutic agents or regimens can be administered simultaneously, sequentially, or in overlapping dosing regimens. Those of skill in the art will appreciate that combination therapy includes but does not require that the two agents or regimens be administered together in a single composition, nor at the same time.

[0057] Control expression or activity: As used herein, a first element (e.g., a protein, such as a transcription factor, or a nucleic acid sequence, such as promoter) “controls” or “drives” expression or activity of a second element (e.g., a protein or a nucleic acid encoding an agent such as a protein) if the expression or activity of the second element is wholly or partially dependent upon status (e.g., presence, absence, conformation, chemical modification, interaction, or other activity) of the first under at least one set of conditions. Control of expression or activity can be substantial control or activity, e.g., in that a change in status of the first element can, under at least one set of conditions, result in a change in expression or activity of the second element of at least 10% (e.g., at least 20%, 30%, 40%, 50%, 60%, 70%, 80%, 90%, 100%, 2-fold, 3-fold, 4-fold, 5-fold, 10-fold, 20-fold, 30-fold, 40-fold, 50-fold, 100-fold) as compared to a reference control.

[0058] Corresponding to: As used herein, the term “corresponding to” may be used to designate the position/identity of a structural element in a compound or composition through comparison with an appropriate reference compound or composition. For example, in some embodiments, a monomeric residue in a polymer (e.g., an amino acid residue in a polypeptide or a nucleic acid residue in a polynucleotide) may be identified as “corresponding to” a residue in an appropriate reference polymer. For example, those of skill in the art appreciate that residues in a provided polypeptide or polynucleotide sequence are often designated (e.g., numbered or labeled) according to the scheme of a related reference sequence (even if, e.g., such designation does not reflect literal numbering of the provided sequence). By way of illustration, if a reference sequence includes a particular amino acid motif at positions 100-110, and a second related sequence includes the same motif at positions 110-120, the motif positions of the second related sequence can be said to “correspond to” positions 100-110 of the reference sequence. Those of skill in the art appreciate that corresponding positions can be readily identified, e.g., by alignment of sequences, and that such alignment is commonly accomplished by any of a variety of known tools, strategies, and/or algorithms, including without limitation software programs such as, for example, BLAST, CS-BLAST, CUDASW++, DIAMOND, FASTA, GGSEARCH/GLSEARCH, Genoogle, HMMER, HHpred/HHsearch, IDF, Infernal, KLAST, USEARCH, parasail, PSI-BLAST, PSI-Search, ScalaBLAST, Sequilab, SAM, SSEARCH, SWAPHI, SWAPHI-LS, SWIMM, or SWIPE.

[0059] Dosing regimen: As used herein, the term “dosing regimen” can refer to a set of one or more same or different unit doses administered to a subject, typically including a plurality of unit doses administration of each of which is separated from administration of the others by a period of time. In various embodiments, one or more or all unit doses of a dosing regimen may be the same or can vary (e.g., increase over time, decrease over time, or be adjusted in accordance with the subject and/or with a medical practitioner's determination). In various embodiments, one or more or all of the periods of time between each dose may be the same or can vary (e.g., increase over time, decrease over time, or be adjusted in accordance with the subject and/or with a medical practitioner's determination). In some embodiments, a given therapeutic agent has a recommended dosing regimen, which can involve one or more doses. Typically, at least one recommended dosing regimen of a marketed drug is known to those of skill in the art. In some embodiments, a dosing regimen is correlated with a desired or beneficial outcome when administered across a relevant population (i.e., is a therapeutic dosing regimen).

[0060] Downstream and Upstream: As used herein, the term “downstream” means that a first DNA region is closer, relative to a second DNA region, to the C-terminus of a nucleic acid that includes the first DNA region and the second DNA region. As used herein, the term “upstream” means a first DNA region is closer, relative to a second DNA region, to the N-terminus of a nucleic acid that includes the first DNA region and the second DNA region.

[0061] Effective amount: An “effective amount” is the amount of a formulation necessary to result in a desired physiological change in a subject. Effective amounts are often administered for research purposes.

[0062] Engineered: As used herein, the term “engineered” refers to the aspect of having been manipulated by the hand of man. For example, a polynucleotide is considered to be “engineered” when two or more sequences, that are not linked together in that order in nature, are manipulated by the hand of man to be directly linked to one another in the engineered polynucleotide. Those of skill in the art will appreciate that an “engineered” nucleic acid or amino acid sequence can be a recombinant nucleic acid or amino acid sequence, and can be referred to as “genetically engineered.” In some embodiments, an engineered polynucleotide includes a coding sequence and/or a regulatory sequence that is found in nature operably linked with a first sequence but is not found in nature operably linked with a second sequence, which is in the engineered polynucleotide operably linked in with the second sequence by the hand of man. In some embodiments, a cell or organism is considered to be “engineered” or “genetically engineered” if it has been manipulated so that its genetic information is altered (e.g., new genetic material not previously present has been introduced, for example by transformation, mating, somatic hybridization, transfection, transduction, or other mechanism, or previously present genetic material is altered or removed, for example by substitution, deletion, or mating). As is common practice and is understood by those of skill in the art, progeny or copies, perfect or imperfect, of an engineered polynucleotide or cell are typically still referred to as “engineered” even though the direct manipulation was of a prior entity.

[0063] Excipient: As used herein, “excipient” refers to a non-therapeutic agent that may be included in a pharmaceutical composition, for example to provide or contribute to a desired consistency or stabilizing effect. In some embodiments, suitable pharmaceutical excipients may include, for example, starch, glucose, lactose, sucrose, gelatin, malt, rice, flour, chalk, silica gel, sodium stearate, glycerol monostearate, talc, sodium chloride, dried skim milk, glycerol, propylene, glycol, water, ethanol, or the like.

[0064] Expression: As used herein, “expression” refers individually and/or cumulatively to one or more biological process that result in production from a nucleic acid sequence of an encoded agent, such as a protein. Expression specifically includes either or both of transcription and translation.

[0065] Flank: As used herein, a first element (e.g., a nucleic acid sequence or amino acid sequence) present in a contiguous sequence with a second element and a third element is “flanked” by the second element and third element if it is positioned in the contiguous sequence between the second element and the third element. Accordingly, in such arrangement, the second element and third element can be referred to as “flanking” the first element. Flanking elements can be immediately adjacent to a flanked element or separated from the flanked element by one or more relevant units. In various examples in which the contiguous sequence is a nucleic acid or amino acid sequence, and the relevant units are bases or amino acid residues, respectively, the number of units in the contiguous sequence that are between a flanked element and, independently, first and/or second flanking elements can be, e.g., 50 units or less, e.g., no more than 50, 45, 40, 35, 30, 25, 20, 15, 10, 5, 4, 3, 2, 1, or 0 units.

[0066] Fragment: As used herein, “fragment” refers a structure that includes and/or consists of a discrete portion of a reference agent (sometimes referred to as the “parent” agent). In some embodiments, a fragment lacks one or more moieties found in the reference agent. In some embodiments, a fragment includes or consists of one or more moieties found in the reference agent. In some embodiments, the reference agent is a polymer such as a polynucleotide or polypeptide. In some embodiments, a fragment of a polymer includes or consists of at least 3, 4, 5, 6, 7, 8, 9, 10, 11, 12, 13, 14, 15, 16, 17, 18, 19, 20, 25, 30, 35, 40, 45, 50, 55, 60, 65, 70, 75, 80, 85, 90, 95, 100, 110, 120, 130, 140, 150, 160, 170, 180, 190, 200, 210, 220, 230, 240, 250, 275, 300, 325, 350, 375, 400, 425, 450, 475, 500 or more monomeric units (e.g., residues) of the reference polymer. In some embodiments, a fragment of a polymer includes or consists of at least 5%, 10%, 15%, 20%, 25%, 30%, 25%, 40%, 45%, 50%, 55%, 60%, 65%, 70%, 75%, 80%, 85%, 90%, 95%, 96%, 97%, 98%, 99% or more of the monomeric units (e.g., residues) found in the reference polymer. A fragment of a reference polymer is not necessarily identical to a corresponding portion of the reference polymer. For example, a fragment of a reference polymer can be a polymer having a sequence of residues having at least 5%, 10%, 15%, 20%, 25%, 30%, 25%, 40%, 45%, 50%, 55%, 60%, 65%, 70%, 75%, 80%, 85%, 90%, 95%, 96%, 97%, 98%, 99% A or more identity to the reference polymer. A fragment may, or may not, be generated by physical fragmentation of a reference agent. In some instances, a fragment is generated by physical fragmentation of a reference agent. In some instances, a fragment is not generated by physical fragmentation of a reference agent and can be instead, for example, produced by de novo synthesis or other means.

[0067] Gene, Transgene: As used herein, the term “gene” refers to a DNA sequence that is or includes coding sequence (i.e., a DNA sequence that encodes an expression product, such as an RNA product and/or a polypeptide product), optionally together with some or all of regulatory sequences that control expression of the coding sequence. In some embodiments, a gene includes non-coding sequence such as, without limitation, introns. In some embodiments, a gene may include both coding (e.g., exonic) and non-coding (e.g., intronic) sequences. In some embodiments, a gene includes a regulatory sequence that is a promoter. In some embodiments, a gene includes one or both of a (i) DNA nucleotides extending a predetermined number of nucleotides upstream of the coding sequence in a reference context, such as a source genome, and (ii) DNA nucleotides extending a predetermined number of nucleotides downstream of the coding sequence in a reference context, such as a source genome. In various embodiments, the predetermined number of nucleotides can be 500 bp, 1 kb, 2 kb, 3 kb, 4 kb, 5 kb, 10 kb, 20 kb, 30 kb, 40 kb, 50 kb, 75 kb, or 100 kb. As used herein, a “transgene” refers to a gene that is not endogenous or native to a reference context in which the gene is present or into which the gene may be placed by engineering.

[0068] Gene product or expression product: As used herein, the term “gene product” or “expression product” generally refers to an RNA transcribed from the gene (pre- and/or post-processing) or a polypeptide (pre- and/or post-modification) encoded by an RNA transcribed from the gene.

[0069] Host cell, target cell: As used herein, “host cell” refers to a cell into which exogenous DNA (recombinant or otherwise), such as a transgene, has been introduced. Those of skill in the art appreciate that a “host cell” can be the cell into which the exogenous DNA was initially introduced and/or progeny or copies, perfect or imperfect, thereof. In some embodiments, a host cell includes one or more viral genes or transgenes. In some embodiments, an intended or potential host cell can be referred to as a target cell.

[0070] In various embodiments, a host cell or target cell is identified by the presence, absence, or expression level of various surface markers.

[0071] A statement that a cell or population of cells is “positive” for or expressing a particular marker refers to the detectable presence on or in the cell of the particular marker. When referring to a surface marker, the term can refer to the presence of surface expression as detected by flow cytometry, for example, by staining with an antibody that specifically binds to the marker and detecting said antibody, wherein the staining is detectable by flow cytometry at a level substantially above the staining detected carrying out the same procedure with an isotype-matched control under otherwise identical conditions and/or at a level substantially similar to that for cell known to be positive for the marker, and/or at a level substantially higher than that for a cell known to be negative for the marker.

[0072] A statement that a cell or population of cells is “negative” for a particular marker or lacks expression of a marker refers to the absence of substantial detectable presence on or in the cell of a particular marker. When referring to a surface marker, the term can refer to the absence of surface expression as detected by flow cytometry, for example, by staining with an antibody that specifically binds to the marker and detecting said antibody, wherein the staining is not detected by flow cytometry at a level substantially above the staining detected carrying out the same procedure with an isotype-matched control under otherwise identical conditions, and/or at a level substantially lower than that for cell known to be positive for the marker, and/or at a level substantially similar as compared to that for a cell known to be negative for the marker.

[0073] Identity: As used herein, the term “identity” refers to the overall relatedness between polymeric molecules, e.g., between nucleic acid molecules (e.g., DNA molecules and/or RNA molecules) and/or between polypeptide molecules. Methods for the calculation of a percent identity as between two provided sequences are known in the art. The term “% sequence identity” refers to a relationship between two or more sequences, as determined by comparing the sequences. In the art, “identity” also means the degree of sequence relatedness between protein and nucleic acid sequences as determined by the match between strings of such sequences. “Identity” (often referred to as “similarity”) can be readily calculated by known methods, including those described in: Computational Molecular Biology (Lesk, A. M., ed.) Oxford University Press, N Y (1988); Biocomputing: Informatics and Genome Projects (Smith, D. W., ed.) Academic Press, N Y (1994); Computer Analysis of Sequence Data, Part I (Griffin, A. M., and Griffin, H. G., eds.) Humana Press, N J (1994); Sequence Analysis in Molecular Biology (Von Heijne, G., ed.) Academic Press (1987); and Sequence Analysis Primer (Gribskov, M. and Devereux, J., eds.) Oxford University Press, NY (1992). Preferred methods to determine identity are designed to give the best match between the sequences tested. Methods to determine identity and similarity are codified in publicly available computer programs. For instance, calculation of the percent identity of two nucleic acid or polypeptide sequences, for example, can be performed by aligning the two sequences (or the complement of one or both sequences) for optimal comparison purposes (e.g., gaps can be introduced in one or both of a first and a second sequences for optimal alignment and non-identical sequences can be disregarded for comparison purposes). The nucleotides or amino acids at corresponding positions are then compared. When a position in the first sequence is occupied by the same residue (e.g., nucleotide or amino acid) as the corresponding position in the second sequence, then the molecules are identical at that position. The percent identity between the two sequences is a function of the number of identical positions shared by the sequences, optionally accounting for the number of gaps, and the length of each gap, which may need to be introduced for optimal alignment of the two sequences. The comparison of sequences and determination of percent identity between two sequences can be accomplished using a computational algorithm, such as BLAST (basic local alignment search tool). Sequence alignments and percent identity calculations may be performed using the Megalign program of the LASERGENE bioinformatics computing suite (DNASTAR, Inc., Madison, Wis.). Multiple alignment of the sequences can also be performed using the Clustal method of alignment (Higgins and Sharp CABIOS, 5, 151-153 (1989) with default parameters (GAP PENALTY=10, GAP LENGTH PENALTY=10). Relevant programs also include the GCG suite of programs (Wisconsin Package Version 9.0, Genetics Computer Group (GCG), Madison, Wis.); BLASTP, BLASTN, BLASTX (Altschul et al., J. Mol. Biol. 215:403-410 (1990); DNASTAR (DNASTAR, Inc., Madison, Wis.); and the FASTA program incorporating the Smith-Waterman algorithm (Pearson, Comput. Methods Genome Res., [Proc. Int. Symp.] (1994), Meeting Date 1992, 111-20. Editor(s): Suhai, Sandor. Publisher: Plenum, New York, N.Y. Within the context of this disclosure it will be understood that where sequence analysis software is used for analysis, the results of the analysis are based on the “default values” of the program referenced. “Default values” will mean any set of values or parameters, which originally load with the software when first initialized.

[0074] “Improve,” “increase,” “inhibit,” or “reduce”: As used herein, the terms “improve”, “increase”, “inhibit”, and “reduce”, and grammatical equivalents thereof, indicate qualitative or quantitative difference from a reference.

[0075] Isolated: As used herein, “isolated” refers to a substance and/or entity that has been (1) separated from at least some of the components with which it was associated when initially produced (whether in nature and/or in an experimental setting), and/or (2) designed, produced, prepared, and/or manufactured by the hand of man. Isolated substances and/or entities may be separated from 10%, 20%, 30%, 40%, 50%, 60%, 70%, 80%, 90%, 91%, 92%, 93%, 94%, 95%, 96%, 97%, 98%, 99%, or more than 99% of the other components with which they were initially associated. In some embodiments, isolated agents are 80%, 85%, 90%, 91%, 92%, 93%, 94%, 95%, 96%, 97%, 98%, 99%, or more than 99% pure. As used herein, a substance is “pure” if it is substantially free of other components. In some embodiments, as will be understood by those skilled in the art, a substance may still be considered “isolated” or even “pure”, after having been combined with certain other components such as, for example, one or more carriers or excipients (e.g., buffer, solvent, water, etc.); in such embodiments, percent isolation or purity of the substance is calculated without including such carriers or excipients. To give but one example, in some embodiments, a biological polymer such as a polypeptide or polynucleotide that occurs in nature is considered to be “isolated” when, a) by virtue of its origin or source of derivation is not associated with some or all of the components that accompany it in its native state in nature; b) it is substantially free of other polypeptides or nucleic acids of the same species from the species that produces it in nature; c) is expressed by or is otherwise in association with components from a cell or other expression system that is not of the species that produces it in nature. Thus, for instance, in some embodiments, a polypeptide that is chemically synthesized or is synthesized in a cellular system different from that which produces it in nature is considered to be an “isolated” polypeptide. Alternatively or additionally, in some embodiments, a polypeptide that has been subjected to one or more purification techniques may be considered to be an “isolated” polypeptide to the extent that it has been separated from other components a) with which it is associated in nature; and/or b) with which it was associated when initially produced.

[0076] Operably linked: As used herein, “operably linked” or “operatively linked” refers to the association of at least a first element and a second element such that the component elements are in a relationship permitting them to function in their intended manner. For example, a nucleic acid regulatory sequence is “operably linked” to a nucleic acid coding sequence if the regulatory sequence and coding sequence are associated in a manner that permits control of expression of the coding sequence by the regulatory sequence. In some embodiments, an “operably linked” regulatory sequence is directly or indirectly covalently associated with a coding sequence (e.g., in a single nucleic acid). In some embodiments, a regulatory sequence controls expression of a coding sequence in trans and inclusion of the regulatory sequence in the same nucleic acid as the coding sequence is not a requirement of operable linkage.

[0077] Pharmaceutically acceptable: As used herein, the term “pharmaceutically acceptable,” as applied to one or more, or all, component(s) for formulation of a composition as disclosed herein, means that each component must be compatible with the other ingredients of the composition and not deleterious to the recipient thereof.

[0078] Pharmaceutically acceptable carrier: As used herein, the term “pharmaceutically acceptable carrier” refers to a pharmaceutically-acceptable material, composition, or vehicle, such as a liquid or solid filler, diluent, excipient, or solvent encapsulating material, that facilitates formulation of an agent (e.g., a pharmaceutical agent), modifies bioavailability of an agent, or facilitates transport of an agent from one organ or portion of a subject to another. Some examples of materials which can serve as pharmaceutically-acceptable carriers include: sugars, such as lactose, glucose and sucrose; starches, such as corn starch and potato starch; cellulose, and its derivatives, such as sodium carboxymethyl cellulose, ethyl cellulose and cellulose acetate; powdered tragacanth; malt; gelatin; talc; excipients, such as cocoa butter and suppository waxes; oils, such as peanut oil, cottonseed oil, safflower oil, sesame oil, olive oil, corn oil and soybean oil; glycols, such as propylene glycol; polyols, such as glycerin, sorbitol, mannitol and polyethylene glycol; esters, such as ethyl oleate and ethyl laurate; agar; buffering agents, such as magnesium hydroxide and aluminum hydroxide; alginic acid; pyrogen-free water; isotonic saline; Ringer's solution; ethyl alcohol; pH buffered solutions; polyesters, polycarbonates and/or polyanhydrides; and other non-toxic compatible substances employed in pharmaceutical formulations.

[0079] Pharmaceutical composition: As used herein, the term “pharmaceutical composition” refers to a composition in which an active agent is formulated together with one or more pharmaceutically acceptable carriers.

[0080] Promoter. As used herein, a “promoter” or “promoter sequence” can be a DNA regulatory region that directly or indirectly (e.g., through promoter-bound proteins or substances) participates in initiation and/or processivity of transcription of a coding sequence. A promoter may, under suitable conditions, initiate transcription of a coding sequence upon binding of one or more transcription factors and/or regulatory moieties with the promoter. A promoter that participates in initiation of transcription of a coding sequence can be “operably linked” to the coding sequence. In certain instances, a promoter can be or include a DNA regulatory region that extends from a transcription initiation site (at its 3′ terminus) to an upstream (5′ direction) position such that the sequence so designated includes one or both of a minimum number of bases or elements necessary to initiate a transcription event. A promoter may be, include, or be operably associated with or operably linked to, expression control sequences such as enhancer and repressor sequences. In some embodiments, a promoter may be inducible. In some embodiments, a promoter may be a constitutive promoter. In some embodiments, a conditional (e.g., inducible) promoter may be unidirectional or bi-directional. A promoter may be or include a sequence identical to a sequence known to occur in the genome of particular species. In some embodiments, a promoter can be or include a hybrid promoter, in which a sequence containing a transcriptional regulatory region can be obtained from one source and a sequence containing a transcription initiation region can be obtained from a second source. Systems for linking control elements to coding sequence within a transgene are well known in the art (general molecular biological and recombinant DNA techniques are described in Sambrook, Fritsch, and Maniatis, Molecular Cloning: A Laboratory Manual, Second Edition, Cold Spring Harbor Laboratory Press, Cold Spring Harbor, N.Y., 1989).

[0081] Reference: As used herein, “reference” refers to a standard or control relative to which a comparison is performed. For example, in some embodiments, an agent, sample, sequence, subject, animal, or individual, or population thereof, or a measure or characteristic representative thereof, is compared with a reference, an agent, sample, sequence, subject, animal, or individual, or population thereof, or a measure or characteristic representative thereof. In some embodiments, a reference is a measured value. In some embodiments, a reference is an established standard or expected value. In some embodiments, a reference is a historical reference. A reference can be quantitative of qualitative. Typically, as would be understood by those of skill in the art, a reference and the value to which it is compared represents measure under comparable conditions. Those of skill in the art will appreciate when sufficient similarities are present to justify reliance on and/or comparison. In some embodiments, an appropriate reference may be an agent, sample, sequence, subject, animal, or individual, or population thereof, under conditions those of skill in the art will recognize as comparable, e.g., for the purpose of assessing one or more particular variables (e.g., presence or absence of an agent or condition), or a measure or characteristic representative thereof.

[0082] Regulatory sequence: As used herein in the context of expression of a nucleic acid coding sequence, a regulatory sequence is a nucleic acid sequence that controls expression of a coding sequence. In some embodiments, a regulatory sequence can control or impact one or more aspects of gene expression (e.g., cell-type-specific expression, inducible expression, etc.).

[0083] Subject: As used herein, the term “subject” refers to an organism, typically a mammal (e.g., a human, rat, or mouse). In some embodiments, a subject is suffering from a disease, disorder or condition. In some embodiments, a subject is susceptible to a disease, disorder, or condition. In some embodiments, a subject displays one or more symptoms or characteristics of a disease, disorder or condition. In some embodiments, a subject is not suffering from a disease, disorder or condition. In some embodiments, a subject does not display any symptom or characteristic of a disease, disorder, or condition. In some embodiments, a subject has one or more features characteristic of susceptibility to or risk of a disease, disorder, or condition. In some embodiments, a subject is a subject that has been tested for a disease, disorder, or condition, and/or to whom therapy has been administered. In some instances, a human subject can be interchangeably referred to as a “patient” or “individual.”

[0084] Therapeutic agent: As used herein, the term “therapeutic agent” refers to any agent that elicits a desired pharmacological effect when administered to a subject. In some embodiments, an agent is considered to be a therapeutic agent if it demonstrates a statistically significant effect across an appropriate population. In some embodiments, the appropriate population can be a population of model organisms or a human population. In some embodiments, an appropriate population can be defined by various criteria, such as a certain age group, gender, genetic background, preexisting clinical conditions, etc. In some embodiments, a therapeutic agent is a substance that can be used for treatment of a disease, disorder, or condition. In some embodiments, a therapeutic agent is an agent that has been or is required to be approved by a government agency before it can be marketed for administration to humans. In some embodiments, a therapeutic agent is an agent for which a medical prescription is required for administration to humans.

[0085] Therapeutically effective amount: As used herein, “therapeutically effective amount” refers to an amount that produces the desired effect for which it is administered. In some embodiments, the term refers to an amount that is sufficient, when administered to a population suffering from or susceptible to a disease, disorder, and/or condition in accordance with a therapeutic dosing regimen, to treat the disease, disorder, and/or condition. In some embodiments, a therapeutically effective amount is one that reduces the incidence and/or severity of, and/or delays onset of, one or more symptoms of the disease, disorder, and/or condition. Those of ordinary skill in the art will appreciate that the term “therapeutically effective amount” does not in fact require successful treatment be achieved in a particular individual. Rather, a therapeutically effective amount may be that amount that provides a particular desired pharmacological response in a significant number of subjects when administered to patients in need of such treatment. In some embodiments, reference to a therapeutically effective amount may be a reference to an amount as measured in one or more specific tissues (e.g., a tissue affected by the disease, disorder or condition) or fluids (e.g., blood, saliva, serum, sweat, tears, urine, etc.). Those of ordinary skill in the art will appreciate that, in some embodiments, a therapeutically effective amount of a particular agent or therapy may be formulated and/or administered in a single dose. In some embodiments, a therapeutically effective agent may be formulated and/or administered in a plurality of doses, for example, as part of a dosing regimen.

[0086] Treatment: As used herein, the term “treatment” (also “treat” or “treating”) refers to administration of a therapy that partially or completely alleviates, ameliorates, relieves, inhibits, delays onset of, reduces severity of, and/or reduces incidence of one or more symptoms, features, and/or causes of a particular disease, disorder, or condition, or is administered for the purpose of achieving any such result. In some embodiments, such treatment can be of a subject who does not exhibit signs of the relevant disease, disorder, or condition and/or of a subject who exhibits only early signs of the disease, disorder, or condition. Alternatively or additionally, such treatment can be of a subject who exhibits one or more established signs of the relevant disease, disorder and/or condition. In some embodiments, treatment can be of a subject who has been diagnosed as suffering from the relevant disease, disorder, and/or condition. In some embodiments, treatment can be of a subject known to have one or more susceptibility factors that are statistically correlated with increased risk of development of the relevant disease, disorder, or condition. A “prophylactic treatment” includes a treatment administered to a subject who does not display signs or symptoms of a condition to be treated or displays only early signs or symptoms of the condition to be treated such that treatment is administered for the purpose of diminishing, preventing, or decreasing the risk of developing the condition. Thus, a prophylactic treatment functions as a preventative treatment against a condition. A “therapeutic treatment” includes a treatment administered to a subject who displays symptoms or signs of a condition and is administered to the subject for the purpose of reducing the severity or progression of the condition.

[0087] Unit dose: As used herein, the term “unit dose” refers to an amount administered as a single dose and/or in a physically discrete unit of a pharmaceutical composition. In many embodiments, a unit dose contains a predetermined quantity of an active agent, for instance a predetermined viral titer (the number of viruses, virions, or viral particles in a given volume). In some embodiments, a unit dose contains an entire single dose of the agent. In some embodiments, more than one unit dose is administered to achieve a total single dose. In some embodiments, administration of multiple unit doses is required, or expected to be required, in order to achieve an intended effect. A unit dose can be, for example, a volume of liquid (e.g., an acceptable carrier) containing a predetermined quantity of one or more therapeutic moieties, a predetermined amount of one or more therapeutic moieties in solid form, a sustained release formulation or drug delivery device containing a predetermined amount of one or more therapeutic moieties, etc. It will be appreciated that a unit dose can be present in a formulation that includes any of a variety of components in addition to the therapeutic moiety(s). For example, acceptable carriers (e.g., pharmaceutically acceptable carriers), diluents, stabilizers, buffers, preservatives, etc., can be included. It will be appreciated by those skilled in the art, in many embodiments, a total appropriate daily dosage of a particular therapeutic agent can include a portion, ora plurality, of unit doses, and can be decided, for example, by a medical practitioner within the scope of sound medical judgment. In some embodiments, the specific effective dose level for any particular subject or organism can depend upon a variety of factors including the disorder being treated and the severity of the disorder; activity of specific active compound employed; specific composition employed; age, body weight, general health, sex, and diet of the subject; time of administration, and rate of excretion of the specific active compound employed; duration of the treatment; drugs and/or additional therapies used in combination or coincidental with specific compound(s) employed, and like factors well known in the medical arts.

### BRIEF DESCRIPTION OF THE FIGURES

[0088] Many of the drawings submitted herein are better understood in color. Applicant considers the color versions of the drawings as part of the original submission and reserve the right to present color images of the drawings in later proceedings.

[0089] FIG. 1. Exemplary vector schematics. The exemplary vector schematics show possible arrangements of components in integrated cassettes and transient expression cassettes useful in embodiments of the provided Ad35 vectors. The integrated cassettes include a transposon and other components between the frt sites. HDAd vectors can include expression products (Exp. Product) such as γ-globin, GFP, mCherry, and hFVIII(ET3); promoter(s) such as EF1α, PGK promoter, or the β promoter; selection marker(s) such as mgmt^{P140K}; regulatory elements (Reg. Elements) such as promoters, polyA tails, and/or insulators (such as cHS4). Transient expression cassettes include similar components, as well as DNA Cutting Molecule(s) (e.g., spCas9) or base editor(s) and genome targeting guide (GTG; e.g. sgRNA). Transposase vectors include a targeted recombinase (e.g., FIpE) and a transposase (e.g., SB100x). The vectors, although illustrated in one orientation/direction, can alternatively be provided in the reverse direction.

[0090] FIGS. 2A-2F. Integrating HDAd5/35++ vector for HSPC gene therapy of hemoglobinopathies. (FIG. 2A) Vector structure. In HDAd-γ-globin/mgmt, the 11.8-kb transposon is flanked by inverted transposon repeats (IR) and FRT sites for integration through a hyperactive Sleeping Beauty transposase (SB100X) provided from the HDAd-SB vector (right panel). The γ-globin expression cassette contains a 4.3-kb version of the β-globin LCR including 4 DNase hypersensitivity (HS) regions and the 0.7-kb β-globin promoter. The 76-Ile HBG1 gene including the 3′-UTR (for mRNA stabilization in erythrocytes) was used. To avoid interference between the LCR/β-promoter and EF1A promoter, a 1.2-kb chicken HS4 chromatin insulator (Ins) was inserted between the cassettes. The HDAd-SB vector contains the gene for the activity-enhanced SB100X transposase and Flpe recombinase under the control of the ubiquitously active PGK and EFTA promoters, respectively. (FIG. 2B) In vivo transduction of mobilized CD46tg mice. HSPCs were mobilized by s.c. injections of human recombinant G-CSF for 4 days followed by 1 s.c. injection of AMD3100. Thirty and 60 minutes after AMD3100 injection, animals were injected i.v. with a 1:1 mixture of HDAd-γ-globin/mgmt plus HDAd-SB (2 injections, each 4×10¹⁰ viral particles). Mice were treated with immunosuppressive (IS) drugs for the next 4 weeks to avoid immune responses against the human γ-globin and MGMT^{P140K}. O⁶-BG/BCNU treatment was started at week 4 and repeated every 2 weeks 3 times. With each cycle the BCNU concentration was increased, from 5 to 7.5 to 10 mg/kg. Immunosuppression was resumed 2 weeks after the last O⁶-BG/BCNU injection. (FIG. 2C) Percentage of human γ-globin⁺ peripheral RBCs measured by flow cytometry. (FIG. 2D) Percentage of human γ-globin⁺ cells in peripheral blood mononuclear cells (MNC), total cells, erythroid Ter119⁺ cells, and nonerythroid Ter119⁻ cells. (FIG. 2E) Percentage of human γ-globin protein compared with adult mouse globin chains (α, β-major, β-minor) measured by HPLC in RBCs at week 18. (FIG. 2F) Percentage of human γ-globin mRNA compared with adult mouse β-major globin mRNA measured by RT-qPCR in total in peripheral blood cells at week 18. Mice that did not receive any treatment were used as a control. In FIGS. 2C-2F, each symbol represents an individual animal.

[0091] FIG. 3. HPLC analysis of globin chains in RBCs from a hCD46tg control mouse and a representative CD46tg mouse after in vivo transduction/selection. The numbers (Volts) indicate the peak intensities. A total of 4 mice from each group was analyzed with similar results. The data are summarized in FIG. 2E. In FIG. 3, area under the curve (AUC) values are offset to the left of the corresponding peak.

[0092] FIGS. 4A-4C. Analysis of mice that received transplantations with bone marrow Lin− cells harvested at week 18 after in vivo transduction (“secondary recipients”). (FIG. 4A) Engraftment measured in blood samples at the indicated time points based on the percentage of human CD46-positive cells in PBMCs. (FIG. 4B) Engraftment in bone marrow, spleen, and PBMCs at week 20. (FIG. 4C) Ratio of human γ- to mouse α-globin protein measured by HPLC in RBCs. Each symbol represents an individual animal. Statistical analyses were done with the non-parametric Kruskal-Wallis test.

[0093] FIGS. 5A-5E. Analysis of transgene integration in bone marrow cells of week 20 secondary recipients. (FIG. 5A) Localization of integration sites on mouse chromosomes of bone marrow cells. Shown is a representative mouse. Each line is an integration site. The number of integration sites in this sample is 2,197. (FIG. 5B) Distribution of integrations in genomic regions. Integration site data from 5 mice were pooled and used to generate the graph. (FIG. 5C) The number of integrations overlapping with continuous genomic windows and randomized mouse genomic windows and size was compared. Pooled data were used as in FIG. 5B). The Pearson's χ² test P value for similarity is 0.06381, implying that the integration pattern is close to random. (FIG. 5D) Transgene copy numbers. Genomic DNA from total bone marrow cells from untransduced control mice and week 20 secondary recipients was subjected to qPCR with human γ-globing-specific primers. Shown is the copy number per cell for individual animals. Each symbol represents an individual animal. (FIG. 5E) Transgene copy numbers in individual clonal progenitor colonies. Bone marrow Lin⁻ cells were plated in methylcellulose, and individual colonies were picked 15 days later. qPCR was performed on genomic DNA. Shown is normalized qPCR signal in individual colonies expressed as transgene copy number per cell (n=113). Each symbol represents the copy number in an individual colony derived from a single cell.

[0094] FIG. 6. qPCR in single cell-derived progenitor colonies to measure the VCN (see FIG. 7E).

[0095] FIGS. 7A-7E. Hematological parameter after in vivo HSPC transduction/selection in CD46tg mice (week 18 after HDAd injection). (FIG. 7A) WBC counts. (FIG. 7B) Representative blood smears from an untreated mouse and a mouse at week 18 after HDAd-γ-globin/mgmt plus HDAd-SB injection. Scale bar: 20 μm. Nuclei of WBCs stain purple. (FIG. 7C) Hematological parameters. Hb, hemoglobin; HCT, hematocrit; MCV, mean corpuscular volume; MCH, mean corpuscular hemoglobin; MCHC, mean corpuscular hemoglobin concentration; RDW, red cell distribution width. n 3, *P<0.05. Statistical analysis was performed using 2-way ANOVA. (FIG. 7D) Cellular bone marrow composition in naive mice (control) and treated mice sacrificed at week 18. Shown is the percentage of lineage marker-positive cells (Ter119+, CD3+, CD19+, and Gr-1+ cells) and HSPCs (LSK cells). (FIG. 7E) Colony-forming potential of bone marrow Lin− cells harvested at week 18 after in vivo transduction. Shown is the number of colonies that formed after plating of 2,500 Lin− cells. In FIG. 7A and FIGS. 7C-7E, each symbol represents an individual animal. NE, neutrophils; LY, lymphocytes; MO, monocytes; BA, basophils.

[0096] FIG. 8. Generation of the CD46++/Bhhth-3 thalassemic model. Female CD46tg mice were bred with male Hbbth-3 mice. The F1 hybrid mice were back-crossed with hCD46+/+ mice to generate Hbbth-3 mice homozygous for hCD46+/+

[0097] FIGS. 9A-9C. Phenotype of the CD46+/+/Hbbth-3 mouse thalassemia model. (FIG. 9A) Hematological parameters of CD46+/+/Hbbth-3 mice (n=7) as compared with CD46tg (n=3) and Hbbth-3 mice (n=3). Each symbol represents an individual animal. *P≤0.05, **P≤0.0002, ***P≤0.00003. Statistical analysis was performed using 2-way ANOVA. RET, reticulocytes. (FIG. 9B) Representative peripheral blood smears after staining with May-Grunwald/Giemsa. Scale bar: 20 μm. (FIG. 9C) Extramedullary hemopoiesis by H&E staining in liver and spleen sections of CD46^{+/+}/Hbbth-3 mice (bottom left 2 panels) as compared with spleen and liver sections of CD46tg mice (top left 2 panels). Scale bars: 20 μm. Clusters of erythroblasts in the liver are indicated in the bottom left panel. Circles in the bottom middle panel mark megakaryocytes in the spleen. Iron deposition (granular bluish deposits) by Perl's Prussian Blue staining in the spleen are shown in the top right panel for CD46tg and the bottom right panel for CD46^{+/+}/Hbbth-3 mice. Scale bar: 25 μm.

[0098] FIG. 10. Analysis of white blood cells in thalassemic mice (Hbbth-3 and CD46^{+/+}/Hbbth-3) compared to “healthy” CD46tg mice. WBCs: white blood cells, NEU: neutrophils, LY: lymphocytes, MONO: monocytes. **p≤0.05, **p≤0.0002, ***p≤00003. These are baseline levels in mice before treatment. (n=8 for CD46tg, n=4 for Hbbth3, n=20 for CD46++/Hbbth3). Each symbol represents an individual animal. Statistical analyses were done with the non-parametric Kruskal-Wallis test.

[0099] FIG. 11. Mobilization of HSPCs in CD46^{+/+}/Hbbth-3 mice. Shown are the numbers of mobilized LSK (Lineage-/Sca-1+/c-Kit+/) cells in peripheral blood at 1 hour after the last AMD3100 injection. n=17 mobilized mice; n=3 untreated mice. Statistical analyses were done with the non-parametric Kruskal-Wallis test.

[0100] FIG. 12. In vivo transduction/selection of mobilized CD46^{+/+}/Hbbth-3 mice. In vivo transduction of mobilized CD46^{+/+}/Hbbth3 mice. HSPCs were mobilized by s.c. injections of human recombinant G-CSF for 6 days (days 1-6) followed by three s.c. injections of AMD3100/Plerixafor (days 5-7). 30 and 60 minutes after Plerixafor injection, animals were intravenously injected with a 1:1 mixture of HDAd-γ-globin/mgtm+HDAd-SB (2 injections, each 4×10¹⁰ vp). Following in vivo transduction, immuno-suppression was administered for 17 weeks to avoid immune responses against the human γ-globin and MGMT^{P140K} proteins. At week 17, treated mice either served as donors for secondary transplants or were subjected to in vivo selection with O⁶-BG/BCNU. Secondary C57Bl/6 recipients were followed for 16 weeks under immunosuppression and then sacrificed. Mice subjected to in vivo selection received an escalating (5, 7.5, 10, 10 mg/kg) O⁶-BG/BCNU treatment every other week. Immuno-suppression was resumed two weeks after the last O⁶-BG/BCNU dose. At week 29, mice were sacrificed, and their bone marrow was transplanted into C57Bl/6 secondary recipients.

[0101] FIGS. 13A-13F. Analysis of in vivo-transduced CD46^{+/+}/Hbbth-3 mice that did not receive O⁶BG/BCNU treatment. (FIG. 13A) Percentage of human γ-globin in peripheral RBCs measured by flow cytometry. The experiment was performed 3 times, indicated by different symbol shapes. (FIG. 13B) γ-Globin expression in erythroid (Ter119⁺) and nonerythroid (Ter119⁻) blood cells. ***P≤0.00003 by 1-way ANOVA test. (FIG. 13C) RBC analysis of healthy (CD46tg) mice (n=3), CD46^{+/+}/Hbbth-3 mice prior to mobilization and in vivo transduction (n=14), and CD46^{+/+}/Hbbth-3 mice that underwent in vivo transduction and were analyzed at week 16 (n=8). *P≤0.05. Statistical analysis was performed using 2-way ANOVA. (FIG. 13D) Histological phenotype. Top: Blood smears. Middle: Supravital stain of peripheral blood smears with Brilliant cresyl blue for reticulocyte detection. The percentages of positively stained reticulocytes in representative smears were: for CD46tg, 8%±0.8%; for CD46^{+/+}/Hbbth-3 before transduction, 39%±1.3%; and for CD46^{+/+}/Hbbth-3 week 16 after transduction, 26%±0.45%. Bottom: Extramedullary hemopoiesis. Scale bars: 20 μm. (FIG. 13E and FIG. 13F) Analysis of secondary recipients. Total bone marrow from week 16 in vivo-transduced mice was transplanted into C57BL/6 mice that received sublethal busulfan preconditioning. Mice received immunosuppression during the period of observation. (FIG. 13E) Engraftment based on the percentage of human CD46+ (hCD46+) PBMCs. (C57BL/6 recipients do not express hCD46.) (FIG. 13F) Percentage of human γ-globin⁺ RBCs. Each symbol represents an individual animal.

[0102] FIGS. 14A-14F. Analysis of γ-globin expression in in vivo-transduced CD46^{+/+}/Hbbth-3 mice after in vivo selection. (FIG. 14A) Percentage of human γ-globin in peripheral RBCs measured by flow cytometry. Arrows indicate the time points of O⁶-BG/BCNU treatment. Different symbols represent 3 independent experiments. The data up to week 16 are identical to those in FIG. 13A. (FIG. 14B) Percentage of γ-globin-expressing cells in hematopoietic tissues at sacrifice (week 29) analyzed by flow cytometry. *P≤0.05, **P≤0.0002, ***P≤0.00003. (FIG. 14C) γ-Globin expression in MACS-purified Ter119 cells. Bone marrow cells from primary recipients at week 29 were immunomagnetically selected for Ter119⁺ cells. γ-Globin expression was measured in Ter119⁺ and Ter119⁻ cells by flow cytometry. ***P≤0.0002. (FIG. 13D) Fold enrichment of γ-globin⁺ erythroid (Ter119+) and nonerythroid (Ter119⁻) cells in peripheral blood, bone marrow, and spleen before versus after in vivo selection (week 16 vs. week 29). n=5, **P≤0.0002. (FIG. 14E) Percentage of human γ-globin protein compared with mouse α-globin protein, measured by HPLC in RBCs. Statistical analyses were done with the nonparametric Kruskal-Wallis test. (FIG. 14F) Level of human γ-globin mRNA over adult mouse β-major globin mRNA measured by RT-qPCR in peripheral blood cells. Untreated CD46^{+/+}/Hbbth-3 mice were used as control. Each symbol represents an individual animal.

[0103] FIGS. 15A-15D. HPLC analysis of globin chains in RBCs. (FIG. 15A) Representative chromatograms of mouse globin peaks in a control CD46tg mouse. The peaks for adult mouse alpha (α), beta (β)-minor, and β-major globin are labeled. (FIGS. 15B-15D) Chromatogram of RBCs from a CD46^{+/+}/Hbbth-3 mice (#71). Note that these mice are heterozygous for β-minor and β-major gene deletions. The extra peaks around 29 min could be associated with this. In (FIG. 15D), the peak specific to human γ-globin is labeled. Representative chromatograms are shown. The numbers (Volts) indicate the peak intensities. In FIGS. 15C and 15D, AUC values are offset to the left of the corresponding peak.

[0104] FIG. 16. DNA analysis of treated CD46++/Hbbth-3 mice at week 29. Transgene (γ-globin) copy number per bone marrow cell. Each symbol represents an individual animal.

[0105] FIGS. 17A-17E. Phenotypic correction of CD46^{+/+}/Hbbth-3 mice by in vivo HSPC transduction/selection. (FIG. 17A) RBC analysis of healthy (CD46tg) mice, CD46^{+/+}/Hbbth-3 mice prior to mobilization and in vivo transduction, and CD46^{+/+}/Hbbth-3 mice that underwent in vivo transduction/selection (analyzed at week 29 after HDAd infusion) (n=5). *P≤0.05, **P≤0.0002, ***P≤0.00003. Statistical analysis was performed using 2-way ANOVA. (FIG. 17B) Supravital stain of peripheral blood smears with Brilliant cresyl blue for reticulocyte detection. Arrows indicate reticulocytes containing characteristic remnant RNA and micro-organelles. The percentages of positively stained reticulocytes in representative smears were: for CD46, 7%; for CD46^{+/+}/Hbbth-3 before treatment, 31%; and for CD46^{+/+}/Hbbth-3 after treatment, 12%. Scale bar: 20 μm. (FIG. 17C) Top: Blood smears. Scale bar: 20 μm. Middle: Bone marrow cytospins. Arrows indicate erythroblasts at different stages of maturation and a backshift in erythropoiesis with pro-erythroblast predominance in treated mice. Scale bar: 25 μm. Bottom: Tissue hemosiderosis by Perl's stain. Iron deposition is shown as cytoplasmic blue pigments of hemosiderin in spleen tissue sections. The blood smear images for the control mice (CD46tg and CD46^{+/+}/Hbbth-3, before transduction) in (FIG. 17C) and (FIG. 18D) are from the same sample. (FIG. 17D) Macroscopic spleen images of 1 representative CD46tg and 1 untreated CD46^{+/+}/Hbbth-3 mouse and 5 treated CD46^{+/+}/Hbbth-3 mice. (FIG. 17E) At sacrifice, spleen size was determined as the ratio of spleen weight to total body weight (mg/g). Each symbol represents an individual animal. Data are presented as means±SEM. *P≤0.05. Statistical analysis was performed using 1-way ANOVA.

[0106] FIGS. 18A-18E. Analysis of secondary C57BL/6 recipients with transplanted bone marrow cells from treated CD46^{+/+}/Hbbth-3 mice. (FIG. 18A) Engraftment rates measured in the periphery based on the percentage of human CD46+ (hCD46+) cells in PBMCs after busulfan conditioning or total-body irradiation (TBI). (C57BL/6 recipients do not express hCD46.) (FIG. 18B) Percentage of human γ-globin-expressing peripheral blood RBCs. All mice received immunosuppression starting from week 4 after transplantation. (FIG. 18C) Percentage of γ-globin⁺ cells in hCD46+ (donor-derived) cells. (FIG. 18C and FIG. 18D) γ-Globin/CD46 expression in secondary C57BL/6 recipients at week 20 after transplant (busulfan preconditioning). CD46+ cells were immunomagnetically separated from the chimeric bone marrow of 3 representative secondary mice and analyzed for γ-globin expression by flow cytometry. Notably, unlike humans, huCD46tg mice express CD46 on RBCs. (FIG. 18C) γ-Globin/CD46 marking rates of primary and secondary recipients at sacrifice. (FIG. 18D) γ-Globin expression in CD46+-selected cells from the hematopoietic tissues of secondary recipients (week 20). Each symbol represents an individual animal. (FIG. 18E) γ-Globin expression in secondary recipients that received a new (second) round of HSPC mobilization/in vivo transduction (n=5). Secondary recipients (busulfan-preconditioned) were analyzed for γ-globin and CD46 expression at week 20 after transplantation (“Before in vivo transduction”). These mice were then mobilized and transduced in vivo with the HDAd-γ-globin plus HDAd-SB vectors. Four weeks after in vivo transduction, mice were sacrificed and analyzed (“Week 4 after in vivo transduction”). ***P≤0.00003. Statistical analyses were performed using 1-way ANOVA.

[0107] FIGS. 19A-19D. Safety of in vivo transduction/selection in the CD46^{+/+}/Hbbth-3 mouse model. (FIG. 19A) WBC and platelet (PLT) counts during and after in vivo selection. O⁶BG/BCNU treatment is indicated by asterisks. n≥3. (FIG. 19B) Absolute numbers of circulating WBC subpopulations. n 3. (FIG. 19C) Cellular bone marrow composition in control and treated mice sacrificed at week 29. Shown is the percentage of lineage marker-positive cells (Ter119+, CD3+, CD19+, and Gr-1+ cells) and HSPCs (LSK cells). (FIG. 19D) Colony-forming potential of bone marrow cells harvested at week 29. Each symbol represents an individual animal. *P≤0.05, **P≤0.0002, ***P≤0.00003. Statistical analyses were performed using 2-way ANOVA. NEU: neutrophils; LY: lymphocytes; MO: monocytes.

[0108] FIGS. 20A-20F. Effect of anti-HDAd5/35⁺⁺ antibodies on a second round of transduction. (FIG. 20A) CD46tg mice were mobilized and injected with HDAd-mgmt/GFP+HDAd-SB. Serum samples were collected as indicated. (FIG. 20B, FIG. 20C) Flow cytometry analysis of PBMCs at day 4 and week 4 after mobilization/transduction. (FIG. 20D) Second round of mobilization/transduction at week 4 and subsequent GFP analysis. (FIG. 20E) anti-HDAd5/35⁺⁺ antibody titers based on OD₄₅₀. An OD₄₅₀=0.2 titer is considered to be neutralizing. (FIG. 20F) Percentage of GFP-positive PBMCs measured in different cohorts (see FIGS. 20B-20D). Ctrl are untreated CD46tg mice. Each symbol in (FIG. 20E) and (FIG. 20F) represents an individual animal. Statistical analyses were done with the non-parametric Kruskal-Wallis test.

[0109] FIGS. 21A-21D. Vector DNA biodistribution at week 18 after HDAd injection (10 weeks in vivo selection) (FIG. 21A) Primer design. The light gray primers are specific to the transgene cassette and will detect both integrated and episomal vector DNA. The dark gray primers will detect vector stuffer DNA derived from plasmid pHCA. Upon SB100x-mediated integration, the corresponding target region for the dark gray primers will be lost. The dark gray primers are therefore used to measure episomal vector copies. (FIG. 21B) Standard curve of integrated transgene copy number. (FIG. 21C) Standard curve for HCA (episomal vector) copy number. (FIG. 21D) Integrated transgene copy number per cell. Episomal vector copies (dark gray primers) were subtracted from total vector copies (light gray primers). The vector-specific signals were normalized to GAPDH. Each symbol represents an individual animal.

[0110] FIGS. 22A-22C. In vitro assay to assess the mutagenicity of O⁶BG/BCNU treatment. (FIG. 22A) After overnight recovery from cryopreservation, CD34⁺ cells were transduced with HDAd-mgmt/GFP or HDAd control at an MOI of 3000 vp/cell which mediated GFP expression in 50% of cells two days later. Cells were then treated with 10 mM O⁶BG followed by 25 mM BCNU (or DMSO solvent) for 2 hours. After washing, cells were plated in methylcellulose for CFU assay (3000 cells per 35 mm dish). Colonies and pooled cells were counted 14 days later and genomic DNA subjected to whole exome sequencing. (FIG. 22B) Numbers of pooled cells per plate. Each symbol represents the cell number in an individual 35 mm dish. Statistical analyses were done with the non-parametric Kruskal-Wallis test. (FIG. 22C) Representative colony from the HDAd-mgmt/GFP+O⁶BG/BCNU group. It demonstrates GFP expression in the majority of cells with GFP fading at the colony periphery due to the loss of episomal viral genomes. The scale bar is 1 mm.

[0111] FIG. 23. Vector structures. HDAd-short-LCR: This vector contains a 4.3 kb mini-LCR consisting of the core regions of DNase hypersensitivity sites (HS) 1 to 4 and a 0.66 kb β-globin promoter. The length of the transposon is 11.8 kb. HDAd-long-LCR. The γ-globin gene is under the control of a 21.5 kb β-globin LCR (chr11: 5292319-5270789), a 1.6 kb β-globin promoter (chr11: 5228631-5227023 or chr11: 5228631-5227018, for instance) and a 3′HS1 region (chr11: 5206867-5203839) also derived from the β-globin locus. For RNA stabilization in erythroid cells, a γ-globin gene UTR was linked to the 3′ end of the γ-globin gene. The vector also contains an expression cassette for mgmtP140K allowing for in vivo selection of transduced HSPCs and HSPC progeny. The γ-globin and mgmt expression cassettes are separated by a chicken globin HS4 insulator (cHS4). The 32.4 kb LCR-γ-globin/mgmt transposon is flanked by inverted repeats (IRs) that are recognized by SB100x and by ftr sites that allow for the circularization of the transposon by Flpe recombinase. HDAd-SB: The second vector required for integration contains the expression cassettes for the activity-enhanced Sleeping Beauty SB100x transposase and the Flpe recombinase.

[0112] FIGS. 24A-24F. SB100x-mediated integration of the 32.4 kb transposon after ex vivo HSPC transduction study with HDAd-long-LCR. (FIG. 24A) Experimental regimen: Bone marrow Lin− cells from CD46-transgenic mice were transduced with HDAd-long-LCR and HDAd-SB at a total MOI of 500 vp/cell. After one day in culture, 1×106 transduced cells/mouse were transplanted into lethally irradiated C57Bl/6 mice. At week 4, O6BG/BCNU treatment was started and repeated four times every two weeks. With each cycle, the BCNU concentration was increased from 5 mg/kg, to 7.5 mg/kg, to 10 mg/kg (twice). At week 20, mice were sacrificed. (FIG. 24B) Percentage of human γ-globin-positive peripheral red blood cells (RBC) measured by flow cytometry. Each symbol is an individual animal. (FIG. 24C) Representative flow cytometry data showing human γ-globin-expression in erythroid (Ter119⁺) bone marrow cells (lower panel) at week 20 after transplantation. The top panel shows a mouse transplanted with mock-transduced cells. (FIG. 24D) Schematic of iPCR analysis: Five micrograms of genomic DNAs were digested with SacI, re-ligated, and subjected to nested, inverse PCR with the indicated primers (see Materials and Methods). (FIG. 24E) Agarose gel electrophoresis of cloned plasmids containing integration junctions. Indicated bands were excised and sequenced. The chromosomal localization of integration sites are shown below the gel. (FIG. 24F) Examples of junction sequences: 5′ end vector sequence, Sleeping beauty IR/DR sequence, integration junction (chr15, 6805206) SEQ ID NO: 1; 5′ end vector sequence, Sleeping beauty IR/DR sequence, integration junction (chrX, 16897322) SEQ ID NO: 2; 3′ end vector sequence, Sleeping beauty IR/DR sequence, integration junction (chr4, 10207667) SEQ ID NO: 3. The vector body and IR/DR sequences are designated in plain text and underlining, respectively. The chromosomal sequence is designated in bold text. The TA dinucleotides used by SB100x at the junction of the IR and chromosomal DNA are bracketed.

[0113] FIGS. 25A-25E. In vivo HSPC transduction with HDAd-long-LCR containing the 32.4 kb transposon and HDAd-short-LCR containing an 11.8 kb transposon. (FIG. 25A) Treatment regimen: hCD46tg mice were mobilized and IV injected with either HDAd-short-LCR+HDAd-SB or HDAd-long-LCR+HDAd-SB (2 times each 4×1010 vp of a 1:1 mixture of both viruses). Five weeks later, O6BG/BCNU treatment was started. With each cycle, the BCNU concentration was increased from 5 mg/kg, to 7.5 mg/kg, and 10 mg/kg. The O6BG concentration was 30 mg/kg in all four treatments. Mice were followed until week 20 when animals were sacrificed for analysis. Bone marrow Lin− cells were used for transplantation into secondary recipients. Secondary recipients were then followed for 16 weeks. (FIG. 25B) Percentage of human γ-globin-positive cells in peripheral red blood cells (RBCs) measured by flow cytometry. Each symbol is an individual animal. In mice that were mock-transduced, less than 0.1% of cells were γ-globin-positive. (FIG. 25C) γ-globin protein chain levels measured by HPLC in RBCs at week 20 after in vivo HSPC transduction. Shown are the percentages of human γ-globin to mouse α-globin protein chains. (FIG. 25D) γ-globin mRNA levels measured by qRT-PCR in total blood at week 20 after in vivo HSPC transduction. Shown are the percentages of human γ-globin mRNA to mouse α-globin mRNA. (FIG. 25E) Vector copy number per cell in bone marrow mononuclear cells, harvested at week 20 after in vivo HSPC transduction. The difference between the two groups is not significant. Statistical analyses were performed using two-way ANOVA.

[0114] FIGS. 26A-26D. Hematological parameters at week 20 after in vivo HSPC transduction. (FIG. 26A) White blood cells (WBC), neutrophils (NE), leukocytes (LY), monocytes (MO), eosinophils (EO), and basophils (BA). (FIG. 26B) Erythropoietic parameters. RBC: red blood cells, Hb: hemoglobin, MCV: mean corpuscular volume, MCH: mean corpuscular hemoglobin, MCHC: mean corpuscular hemoglobin concentration, RDW: red cell distribution width. The differences between the three groups were not significant. (FIG. 26C) Cellular bone marrow composition. (FIG. 26D) Colony-forming potential of bone marrow Lin⁻ cells. The differences between the groups were not significant in FIGS. 26A-26D.

[0115] FIG. 27. Schematic of insertion site analysis. The localization of NheI and KpnI sites in the HDAd-long-LCR vector in relation to the Sleeping Beauty inverted repeats (IRs) is indicated. These enzymes cut close, but outside of the SB IR/DR and are used to decrease the background of unintegrated vectors. Genomic DNA from bone marrow Lin− cells was digested with NheI and KpnI, and after heat inactivation, further digested with NIaIII. NIaIII is a 4-cutter and will create small DNA fragments. Digested DNA was then ligated with double stranded oligos with known sequence and compatible ends to the digested NIaIII fragments. Following heat-inactivation and clean-up, the linker-ligated products were used for linear amplification, which creates a single-stranded (ss) DNA population primed from the SB left arm. The primer is biotinylated, so the ssDNAs can be collected with streptavidin beads. After extensive washing, ssDNA was eluted from the beads and subjected to further amplification by two rounds of nested PCR. PCR amplicons were gel purified, cloned, sequenced and mapped to the mouse genome sequences to mark the integration sites.

[0116] FIGS. 28A-28D. Analysis of vector integration sites in HSPCs by LAM-PCR/NGS. Genomic DNA isolated from bone marrow cells harvested at week 20 after in vivo transduction with HDAd-long-LCR+HDAd-SB. (FIG. 28A) Chromosomal distribution of integration sites. The integration sites are marked by vertical lines. (FIG. 28B) Examples of junction sequences: Sleeping beauty IR/DR sequence, integration junction (chr7, 79796094) SEQ ID NO: 4; Sleeping beauty IR/DR sequence, Integration junction (repeat region) SEQ ID NO: 5. IR/DR sequences are designated by underlining and bold text. The chromosomal sequence is designated in plain text. The TA dinucleotides used by SB100x at the junction of the IR and chromosomal DNA are bolded. (FIG. 28C) Integration sites were mapped to the mouse genome and their location with respect to genes was analyzed. Shown is the percentage of integration events that occurred 1 kb upstream transcription start sites (TSS) (0.0%), 5′UTR of exons (0.0%), protein coding sequences (0.0%), introns (17.0%), 3′UTRs (0.0%), 1 kb downstream from 3′UTR (0.0%), and intergenic (83.0%). (FIG. 28D) Integration pattern in mouse genomic windows. The number of integrations overlapping with continuous genomic windows and randomized mouse genomic windows and size was compared. This shows that the pattern of integration is similar in continuous and random windows. Maximum number of integrations in any given window was not more than 3; with one integration per window having the higher incidence.

[0117] FIGS. 29A-29I. Analysis of secondary recipients. Bone marrow Lin− cells harvested at week 20 from in vivo transduced CD46tg mice were transplanted into lethally irradiated C57Bl/6 mice. Secondary recipients were followed for 16 weeks. (FIG. 29A) Engraftment rates based on the percentage of CD46-positive PBMCs at weeks 4, 8, 12, and 16 after transplantation. The differences between the two groups were not significant. (FIG. 29B) Percentage of γ-globin-expressing peripheral blood RBCs measured by flow cytometry. The differences between the two groups are not significant. (FIG. 29C) Vector copy number per cell in bone marrow MNCs harvested at week 20 after in vivo HSPC transduction. The difference between the two groups is not significant. (FIG. 29D) Analysis of human γ-globin chains by HPLC in RBCs of secondary recipients. Shown is the percentage of human γ-globin to adult mouse α-globin. ***p<0.0001. (FIG. 29E) γ-globin mRNA levels in total blood cells relative to mouse α-globin mRNA. (FIG. 29F) Percentage of γ-globin expressing erythroid (Ter119⁺ cells) in all bone marrow MNCs. Statistical analyses were performed using two-way ANOVA. (FIG. 29G) γ-globin mRNA levels bone marrow MNCs at week 16 p.t. Shown are percentages of human γ-globin m-RNA to mouse α and β-major globin mRNA. (FIG. 29H) Erythroid specificity. Percentage of γ-globin⁺ cells in erythroid (Ter119k) and non-erythroid (Ter119⁻) cells. (FIG. 29I) Vector copy number (VCN) per cell in bone marrow MNCs harvested at week 20 after in vivo HSPC transduction. The difference between the two groups is not significant.

[0118] FIGS. 30A-30D. Hematological parameters in secondary recipients at week 16 after transplantation. (FIG. 30A) White blood cells. (FIG. 30B) Erythropoietic parameters. RBC: red blood cells, Hb: hemoglobin, MCV: mean corpuscular volume, MCH: mean corpuscular hemoglobin, MCHC: mean corpuscular hemoglobin concentration, RDW: red cell distribution width. (FIG. 30C) Cellular bone marrow composition. (FIG. 30D) Colony-forming potential of bone marrow Lin− cells. The differences between the groups were not significant in FIGS. 30A-30D. Statistical analyses were performed using two-way ANOVA.

[0119] FIGS. 31A-31D. In vitro studies with human CD34+ cells. (FIG. 31A) Schematic of the experiment: CD34+ cells were transduced with HDAd-long-LCR+HD-SB or HDAd-short-LCR+HDAd-SB and subjected to erythroid differentiation (ED). In vitro selection with O6BG-BCNU was started at day 5 of ED. At day 18 cells were analyzed by flow cytometry (FIG. 31B) and HPLC (FIG. 31C). (FIG. 31D) Vector copy number at day 18. Statistical analyses were performed using two-way ANOVA. *p<0.05; **p<0.0001

[0120] FIGS. 32A-32H. Human γ-globin expression after in vivo HSC gene therapy of Hbb^{th3}/CD46 mice with HDAd-short-LCR and HDAd-long-LCR. (FIG. 32A) Treatment regimen. In contrast to FIGS. 25A-25E, FIGS. 32A-32D show results within thalassemic Hbb^{th3}/CD46 mice. (FIG. 32B) Percentage of human γ-globin-positive cells in peripheral red blood cells (RBCs) measured by flow cytometry. Each symbol is an individual animal. (FIG. 32C) γ-globin protein chain levels measured by HPLC in RBCs at week 18 after in vivo HSPC transduction. Shown are the percentages of human γ-globin to mouse α-globin protein chains. (FIG. 32D) Representative chromatograms of an untreated Hbb^{th3}/CD46 mouse (left panel) and a mouse at week 21 after treatment. Mouse α- and β-chains as well the added human γ-globin are indicated.

[0121] FIGS. 32E-32H. Human γ-globin expression after in vivo HSPC gene therapy of Hbbth3/CD46+/+ mice with HDAd-short-LCR and HDAd-long-LCR. (FIG. 32E) Treatment regimen: In contrast to the study shown in FIG. 25, this study was done with thalassemic Hbbth3/CD46 mice. (FIG. 32F) Percentage of human γ-globin-positive cells in peripheral red blood cells (RBCs) measured by flow cytometry. Each symbol is an individual animal. (FIG. 32G) γ-globin protein chain levels measured by HPLC in RBCs at weeks 10 to 16 after in vivo HSPC transduction. Shown are the percentages of human γ-globin to mouse α-globin protein chains. (FIG. 32H) Representative chromatograms of an untreated Hbbth3/CD46+/+mouse (left panel) and a mouse at week 16 after treatment. Mouse α- and β-chains as well the added human γ-globin are indicated. Notably, two independent studies were performed with Hbbth3/CD46+/+ mice. First study: N=6 for HD-long-LCR and N=2 for HDAd-short-LCR followed for 21 weeks. Second study: N=4 for HD-long-LCR and N=5 for HDAd-short-LCR followed for 16 weeks. FIG. 32F shows the combined data until week 21. Statistical analyses were performed using two-way ANOVA. *p<0.05; **p<0.0001

[0122] FIGS. 33A, 33B. Analysis of bone marrow at sacrifice. Bone marrow was harvested at week 16 after in vivo HSPC transduction of Hbbth3/CD46+/+ mice. (FIG. 33A) Vector copy number per cell in bone marrow MNCs. The difference between the two groups is not significant. (FIG. 33B) Mean Fluorescence Intensity (MFI) of γ-globin in erythroid (Ter119+) cells. Statistical analyses were performed using two-way ANOVA.

[0123] FIG. 34. Micrographs showing the normalized erythrocyte morphology of C57BL6 (Normal mice) and the Townes SCA mice, before treatment and at week 10 after treatment-long LCR.

[0124] FIG. 35. Micrographs showing the normalized erythropoiesis (reticulocyte count) for Townes mice, before treatment, and Townes mice at week 10, after treatment (long LCR).

[0125] FIGS. 36A-36C. Phenotypic correction. (FIGS. 36A, 36B) Blood cell morphology with left panel displaying blood smears stained with Giemsa stain and right panels displaying blood smears stained with May-Grunwald stain. Remnants of nuclei and cytoplasm in reticulocytes results in purple staining. (FIG. 36A) Comparison before and at week 14. (FIG. 36B) Comparison of Giemsa stain and reticulocytes for CD46tg, Hbb^{th3}/CD46 mice before, Hbb^{th3}/CD46 mice with HDAd-long-LCR at week 18, and Hbb^{th3}/CD46 mice with HDAd-long-LCR at week 21. (FIG. 36C) Bone marrow cytospins. Visible is a bac k-shift in erythropoiesis with pro-erythroblast predominance in treated. The scale bar is 20 μm.

[0126] FIGS. 37A, 37B. Phenotypic correction (week 16). (FIG. 37A) Left panels: Blood smears stained with Giemsa/May-Grunwald stain (5 min). Right panels: Blood smears stained with Brilliant cresyl blue for reticulocytes. Remnants of nuclei and cytoplasm in reticulocytes appear as purple staining. (FIG. 37B) Bone marrow cytospins stained with Giemsa/May-Grunwald stain (15 min). (FIGS. 37A and 37B) Upper panel: Normal bone marrow cellular distribution—erythroid lineage is represented by all stages of erythrocyte differentiation. Middle panel: Predominance of erythroid lineage over white cell lineage—erythroid lineage consists mainly of proerythroblasts and basophilic erythroblasts. Bottom panel: Normal bone marrow cellular distribution—erythroid lineage is mainly represented by maturing polychromatic and orthochromatic erythroblasts. The scale bars are 25 μm.

[0127] FIG. 38: Shows the graphical depiction for normalized erythrocyte parameters of Long LCR vectors, Short LCR vectors, and the control CD46tg, at Week 1 (top panel) and Week 10 (bottom panel).

[0128] FIGS. 39A, 39B. Hematological parameters before and after in vivo HSPC gene therapy of Hbbth3/CD46+/+ mice (week 16). (FIG. 39A) Reticulocyte counts. (FIG. 39B) Hematological parameters. Statistical analyses were performed using two-way ANOVA. *p<0.05; **p<0.0001

[0129] FIGS. 40A, 40B. Phenotypic correction of extramedullary hematopoiesis in spleen and liver. (FIG. 40Ai) Spleen size at sacrifice (week 16). Left panel: representative spleen images. Right panel: summary. Each symbol represents an individual animal. Statistical analysis was performed using one-way ANOVA. **p<0.0001. The difference between the two vectors is not significant. (FIG. 40B) Extramedullary hemopoiesis by hematoxylin/eosin staining in liver and spleen sections. Clusters of erythroblasts in the liver and megakaryocytes in the spleen of Hbbth3/CD46+/+ mice are indicated by black arrows. The scale bars are 20 μm. Representative images are shown.

[0130] FIG. 41. Phenotypic correction of hemosiderosis in spleen and liver (week 16). Iron deposition is shown by Perl's staining as cytoplasmic blue pigments of hemosiderin in spleen and liver sections. The scale bars are 20 μm. Representative sections are shown. (Exp: 2.24 ms, gain: 4.1×, saturation: 1.50, gamma: 0.60).

[0131] FIGS. 42A-42C. Analysis of bone marrow at sacrifice (week 21). Bone marrow was harvested at week 21 after in vivo HSC transduction of Hbb^{th3}/CD46tg mice. (FIG. 42A) Vector copy number per cell in bone marrow MNCs. (FIGS. 42B, 42C) Erythroid specificity of γ-globin expression. (FIG. 42B) Percentage of γ-globin expressing erythroid (Ter119⁺) and non-erythroid (Ter119⁻) cells. *p<0.05. Statistical analyses were performed using two-way ANOVA.

[0132] FIG. 43. Extramedullary hemopoiesis by hematoxylin/eosin staining in liver and spleen sections from CD46tg and CD46^{+/+}/Hbbth⁻³ mice prior to administration of an adenoviral donor vector. Iron deposition is shown by Perl's staining as cytoplasmic blue pigments of hemosiderin in spleen.

[0133] FIGS. 44A-44E. Phenotypic correction of CD46^{+/+}/Hbbth-3 mice by in vivo HSPC transduction/selection. (FIG. 44A) RBC analysis of healthy (CD46tg) mice, CD46^{+/+}/Hbbth-3 mice prior to mobilization and in vivo transduction, and CD46^{+/+}/Hbbth-3 mice that underwent in vivo transduction/selection (analyzed at week 29 after HDAd infusion) (n=5). *P≤0.05, **P≤0.0002, ***P≤0.00003. Statistical analysis was performed using 2-way ANOVA. (FIG. 44B) Supravital stain of peripheral blood smears with Brilliant cresyl blue for reticulocyte detection. Arrows indicate reticulocytes containing characteristic remnant RNA and micro-organelles. The percentages of positively stained reticulocytes in representative smears were: for CD46, 7%; for CD46^{+/+}/Hbbth-3 before treatment, 31%; and for CD46^{+/+}/Hbbth-3 after treatment, 12%. Scale bar: 20 μm. (FIG. 44C) Top: Blood smears. Scale bar: 20 μm. Middle: Bone marrow cytospins. Arrows indicate erythroblasts at different stages of maturation and a backshift in erythropoiesis with pro-erythroblast predominance in treated mice. Scale bar: 25 μm. Bottom: Tissue hemosiderosis by Perls' stain. Iron deposition is shown as cytoplasmic blue pigments of hemosiderin in spleen tissue sections. The blood smear images for the control mice (CD46tg and CD46^{+/+}/Hbbth-3, before transduction) in C and FIG. 5D are from the same sample. (FIG. 44D) Macroscopic spleen images of 1 representative CD46tg and 1 untreated CD46^{+/+}/Hbbth-3 mouse and 5 treated CD46^{+/+}/Hbbth-3 mice. (FIG. 44E) At sacrifice, spleen size was determined as the ratio of spleen weight to total body weight (mg/g). Each symbol represents an individual animal. Data are presented as means Å} SEM. *P≤0.05. Statistical analysis was performed using 1-way ANOVA.

[0134] FIG. 45. Cellular bone marrow composition of CD46 and treated Hbbth3/CD46 mice at week 16 after in vivo transduction. The differences between the groups were not significant. Statistical analyses were performed using two-way ANOVA.

[0135] FIG. 46. Human γ-globin gating strategy. Fixed and permeabilized RBCs from CD46/Hbbth3 mice were stained for the erythroid marker Ter-119 and intracellular γ-globin.

[0136] FIGS. 47A, 47B. Effect of SB100x-mediated integration on the transcriptome of CD34+ cells. (FIG. 47A) Schematic of experiment. CD34+ cells were infected with a HDAd5/35++ vector containing a GFP/mgmt cassette under control of the EF1α promoter alone or in combination with HDAd-SB. Transduced cells were expanded in erythroid differentiation medium for 16 days. Two rounds of O6BG/BCNU selection (50 μM O6BG+35 μM BCNU) enriched for GFP− positive cells with integrated transposons. At day 16, GFP-positive cells were FACS sorted (sample #6). For comparison (sample #5), CD34+ cells that were transduced with the mgmt/GFP vector alone and subjected to selection were used. Because the control cells did not express SB100x, they lost the episomal mgmt/GFP vector and were therefore GFP negative. Total RNA from both samples were subjected to RNA-Seq performed by Omega Bioservices. (FIG. 47B) Genes with altered mRNA expression (log 2 fold change) ranked based on their p value.

[0137] FIG. 48. mgmt mRNA expression levels in bone marrow MNCs at week 16 after in vivo transduction. Human mgmt^{P140K} and mouse mRPL10 levels were measured by qRT-PCR in total bone marrow MNCs. (mRPL10 is a mouse housekeeping gene). The relative levels were further divided by the VCN (see FIG. 33). Statistical analyses were performed using two-way ANOVA.

[0138] FIG. 49. In vivo HSC transduction in vector hCD46tg in mice: “long” vs “short” vectors LCR. In vivo transduction of vector Hbb^{th3}/CD46 in mice. Group 1 shows the in vivo transduction of HDAd-long-LCR-γ-globin/mgmt plus HDAd-SB/Flpe in seven mice. Group 2 shows the in vivo transduction of HDAd-short-LCR γ-globin/mgmt plus HDAd-SB/Flpe in three mice. Only three selection cycles were needed for O⁶BG, BCNU.

[0139] FIG. 50. Thbb mice test (W6). The graphical results show no difference and almost no human γ-globin expression among the mice when transduced with Long LCR vectors verses Short LCR vectors.

[0140] FIG. 51. Thbb mice test (W8). The graphical results show a difference among the mice when transduced with Long LCR vectors verses Short LCR vectors, however, it is unclear if Short LCR virus were dead in the mice.

[0141] FIG. 52. Graphic depiction showing the percentage of human γ-globin expressing RBC in mice. The graph illustrates 100% marking after only three cycles of in vivo selection.

[0142] FIG. 53. Graphic depiction of HPLC showing the relative human γ-globin to mouse HBA (week 10). The graph shows significantly higher γ-globin levels for long LCR compared to short LCR.

[0143] FIG. 54. Graphical depiction of example Week 10 blood HPLC of mouse #57 containing a Long LCR vector.

[0144] FIGS. 55A-55E. Characterization of the AAVS1-specific CRISPR/Cas9 vector and donor vector for HDR-mediated integration. (FIG. 55A) HDAd-CRISPR vector structure: The AAVS1-specific sgRNA is transcribed by Pall from the U6 promoter and the spCas9 gene is under the control of the EF1α promoter. Cas9 expression is controlled by miR-183-5p and miR-218-5p, which suppress Cas9 expression in HDAd producer 116 cells but do not negatively affect Cas9 expression in CD34+ cells (Sayadaminova et al., Mol Ther Methods Clin Dev, 1, 14057, 2015). The corresponding micro RNA target sites (miR-T) were embedded into a 3′ untranslated region of the β-globin gene (3′UTR). (FIG. 55B) Target site cleavage frequency in human CD34+ cells measured by T7E1 assay 3 days after HDAd-CRISPR transduction at a MOI of 2000 vp/cell. The specific cleavage products are 474 bp and 294 bp. The cleavage efficacy is shown below the gel. (FIG. 55C) Top 13 most frequent indels (SEQ ID NOs: 6-18, in order from top to bottom) found in HDAd-CRISPR-transduced CD34+ cells. The light grey highlighted sequence shows the target of the guide RNA with the TAM sequence marked in medium grey highlighting. The CRISPR/Cas9 cleavage site is marked by a vertical arrow. In green are insertion caused by NHEJ. (FIG. 55D) Structure of the donor vector for integration into the AAVS1 site (HDAd-GFP-donor). The mgmtP140K gene is linked to the GFP gene through a self-cleaving picornavirus 2A peptide. The genes are under the control of the EF1α promoter. PA: poly-adenylation signal. The transgene cassette is flanked by 0.8 kb regions of homology to the AAVS1 locus analogous to a previously published study (Lombardo et al., Nat Methods 8, 861-869, 2011). Upstream and downstream of the homology region are recognition sites for the AAVS1-specific CRISPR/Cas9 to release the donor cassette. (FIG. 55E) Release of the donor cassette. CD34+ cells were infected with the HDAd-GFP-donor (at MOIs of 1000 or 2000 vp/cell) alone or in combination with HDAd-CRISPR (MOI 1000 vp/cell). Three days later genomic DNA was subjected to Southern blot with a GFP-specific probe. The (linear) full-length HDAd-donor-GFP genome runs at 36 kb. The released cassette runs at 4.7 kb. The cleavage frequency is shown below the gel.

[0145] FIGS. 56A-56F. Targeted integration vs. SB100x-mediated integration in HUDEP-2 cells. (FIG. 56A) Experiment scheme. HUDEP-2 cells were transduced with the indicated HDAd vectors at a MOI of 1000 vp/cell for each virus. After expansion for 21 days, GFP positive cells were sorted into 96 well plate. Single cell-derived clones were obtained by further expansion for 2 weeks. GFP expression were measured at day 2 and 21 post transduction in the cell population, or at day 35 in cell clones. (FIG. 56B) GFP flow cytometry in cells treated with donor vector alone or vectors with targeted vs SB100x integration mechanisms at day 2 and 21. (FIG. 56C) Mean fluorescence intensity of GFP in total GFP⁺ cells with targeted vs SB100x integration (day 21). Data shown (mean±SD) represent three independent experiments. (FIG. 56D) Mean fluorescence intensity of GFP in single clones. Each symbol represents one cell clone. Data shown (mean±SD) are representative of two independent experiments. (FIG. 56E) Flow cytometry showing GFP expression in representative cell clones with targeted or SB100x-mediated integration. (FIG. 56F) Vector copy number in cell clones by qPCR using GFP primers.

[0146] FIGS. 57A, 57B. Integration analysis of HUDEP-2 clones transduced with targeted integration vectors. (FIG. 57A) Integration site analysis by inverse PCR. The upper diagram shows the locations of utilized NcoI sites, and primers (half arrows. dark gray: EF1α primers for 5′-junctions; light gray: pA primers for 3′ junctions). The expected amplicon size at each side for targeted integration is indicated. The lower gel pictures show iPCR results. Each lane represents one cell clone. The 1 kb ladder from New England Biolabs was used. An extra band of endogenous Ef1α was detected since Ef1α primers were adopted. For clone #20, although the amplicon size is different from prediction, cloning and sequencing revealed it is a clone with target integration. (FIG. 57B) In-Out PCR analysis. The upper diagram shows the location of primers. Expected product sizes for various integration patterns are listed. The lower gel pictures demonstrate that most clones had monoallelic targeted integration. With regard to the results from (FIG. 57A), the unexpected amplicon size from clones #17, #20 and #36 likely resulted from concatemeric integration.

[0147] FIGS. 58A-58C. Cleavage of AAVS1 target site in AAVS1/CD46tg mice. (FIG. 58A) In vitro analysis. Target site cleavage frequency in bone marrow lineage-negative cells from AAVS1/CD46tg mice measured 3 days after in vitro HDAd-CRISPR transduction at the indicated MOIs. (FIG. 58B) Percentage of total AAVS1 indels obtained by deep sequencing of DNA from total bone marrow mononuclear cells at week 14 after transplantation. Each symbol is an individual animal. (FIG. 58C) Top 29 most frequent indels (SEQ ID NOs: 19-23, 21, 21, 26-30, 27, 32, 28, 34-47), in order from top to bottom) found in a mouse. Representative data are shown. The yellow sequence shows the target of the guide RNA with the TAM sequence marked in blue. The CRISPR/Cas9 cleavage site is marked by a vertical arrow.

[0148] FIGS. 59A-59D. Ex vivo transduction of AAVS1/CD46 Lin− cells with HDAd-AAVS1 and HDAd-GFP-donor and subsequent transplantation into lethally irradiated recipients. (FIG. 59A) Schematic of the experiment: Bone marrow was harvested from AAVS1/CD46tg mice and lineage-negative cells (Lin−) were isolated by MACS. Lin− cells were transduced with HDAd-CRISPR and HDAd-GFP-donor alone or in combination at a total MOI of 500 vp/cell. After one day in culture, 1×10⁶ transduced cells/mouse were transplanted into lethally irradiated C57Bl/6 mice. At week 4, O⁶BG/BCNU treatment was started and repeated three times every two weeks. With each cycle, the BCNU concentration was increased from 5 mg/kg, to 7.5 mg/kg, to 10 mg/kg. At week 14, mice were sacrificed and bone marrow Lin− cells were used for transplantation into lethally irradiated secondary C57Bl/6 recipients, which were then followed for 16 weeks. (FIG. 59B) Percentage of GFP-positive cells in peripheral blood mononuclear cells (PBMCs) measured by flow cytometry. Shown are groups that were transplanted with Lin− cells transduced with HDAd-CRISPR only, HDAd-GFP-donor only, and HDAd-CRISPR+HDAd-GFP-donor. Each symbol represents an individual animal. (FIG. 59C) Percentage of GFP+ cells in PBMCs from representative mice transplanted with Lin− cells. Data from week 4 (before selection) and week 12 (after selection) are shown. (FIG. 59D) Percentage of GFP+ cells in lineage-positive cells CD3+ (T-cells), CD19+ (B-cells), Gr-1+ (myeloid cells), and in HSCs (LSK cells).

[0149] FIGS. 60A-60E. Analysis of engraftment of ex vivo transduced Lin− cells. (FIG. 60A) Engraftment of transplanted cells based on human CD46 expression on PBMCs measured by flow cytometry. Each symbol is an individual animal. Notably, transduced donor cells expressed CD46, while recipient C57Bl/6 mice did not. (FIG. 60B) Percentage of CD46-positive cells in PBMCs (blood), spleen, and bone marrow at week 14. (FIG. 60C) Percentage of GFP-positive cells in PBMCs, spleen and bone marrow, at week 14. (FIG. 60D) Percentage of LSK and lineage-positive cells in different transduction settings. The difference between the three groups is not significant. (FIG. 60E) Analysis of GFP+ colonies. Total bone marrow Lin− cells from week 14 mice were plated and GFP expression in colonies was analyzed 12 days later. Each symbol is the average GFP+ colony number for an individual mouse (left panels). Cells from all colonies were pooled and analyzed by flow cytometry (right panels).

[0150] FIGS. 61A-61F. Analysis of GFP marking in secondary recipients. Bone marrow cells from responder mice that were transplanted with HDAd-GFP-donor or HDAd-CRISPR+HDAd-GFP-donor transduced Lin− cells were harvested at week 14 after transplantation, depleted for lineage-positive cells, and transplanted into lethally irradiated C57Bl/6 mice. (FIG. 61A) GFP-flow cytometry of PBMCs in four recipient mice. The right panel shows a typical analysis. The vertical axis shows staining for hCD46, the horizontal axis shows GFP staining. (FIG. 61B) Percentage of GFP-positive cells in PBMCs, spleen and bone marrow, at week 16. (FIG. 61C) GFP flow analysis of lineage-positive and -negative cells in recipients 16 weeks after transplantation. (FIG. 61D) Analysis of GFP+ colonies. Total bone marrow Lin− cells from week 16 mice were plated and GFP expression in colonies was analyzed 12 days later. Each symbol is the average GFP+ colony number for an individual mouse (left panels). Cells from all colonies were pooled and analyzed by flow cytometry (right panels). (FIG. 61E) Engraftment of transplanted cells based on human CD46 expression on PBMCs measured by flow cytometry. (FIG. 61F) Percentage of lineage-positive and -negative cells in different transduction settings. The difference between the two groups is not significant.

[0151] FIGS. 62A-62F. In vivo transduction of AAVS1/CD46tg mice with HDAd-AAVSI-CRISPR+HDAd-GFP-donor. (FIG. 62A) Treatment regimen. AAVS1/hCD46tg mice were mobilized and IV injected with HDAd-CRISPR+HDAd-GFP-donor (2 times each 4×1010 vp of a 1:1 mixture of both viruses). Four weeks later, O6BG/BCNU treatment was started. With each cycle, the BCNU concentration was increased from 2.5 mg/kg, to 7.5 mg/kg, and 10 mg/kg. The O6BG concentration was 30 mg/kg in all three treatments. Mice were followed until week 12 when animals were sacrificed for analysis and Lin− cell transplantation into secondary recipients. Secondary recipients were then followed for 16 weeks. (FIG. 62B) Percentage of GFP-positive cells in peripheral blood mononuclear cells (PBMCs) measured by flow cytometry. (FIG. 62C) Percentage of GFP-positive cells in PBMCs, spleen and bone marrow, at week 14. (FIG. 62D) Percentage of GFP+ cells in lineage-positive cells CD3+ (T-cells), CD19+ (B-cells), Gr-1+ (myeloid cells), and in HSCs (LSK cells). (FIG. 62E) Analysis of GFP+ colonies. Total bone marrow Lin− cells from week 14 mice were plated and GFP expression in colonies was analyzed 12 days later. Each symbol is the average GFP+ colony number for an individual mouse (left panels). Cells from all colonies were pooled and analyzed by flow cytometry (right panels). (FIG. 62F) Percentage of lineage-positive and -negative cells at week 14.

[0152] FIGS. 63A-63E. Analysis of secondary recipients from FIG. 59A-59D. At week 14, bone marrow Lin− cells from in vivo transduced AAVS1/hCD46tg mice were transplanted into lethally irradiated C57Bl/6 recipients. (FIG. 63A) GFP-flow cytometry of PBMCs in six recipient mice. (FIG. 63B) GFP expression in mononuclear cells in blood, spleen and bone marrow. (FIG. 63C) GFP flow analysis of lineage-positive and -negative cells in recipients 16 weeks after transplantation. (FIG. 63D) Engraftment of transplanted cells based on human CD46 expression on PBMCs measured by flow cytometry. (FIG. 63F) Percentage of lineage-positive and -negative cells at week 16.

[0153] FIGS. 64A-64H. Ex vivo transduction of AAVS1/CD46 Lin− cells with HDAd-AAVS1 and HDAd-donor-γ-globin vectors and subsequent transplantation into lethally irradiated recipients. (FIG. 64A) Structure of the donor. The overall structure is the same as for the HDAds-GFP-donor vector (see FIG. 55D). The regions of homology are longer (1.8 kb vs 0.8 kb) in the new HDAd-globin-donor vector. The γ-globin expression cassette contains a 4.3 kb version of the γ-globin LCR including four DNAse hypersensitivity (HS) regions and the γ-globin promoter (Lisowski et al, Blood. 110, 4175-4178, 1996). The full length γ-globin cDNA including that 3′ UTR (for mRNA stabilization in erythrocytes) was used. The mgmtP140K gene is under the control of the ubiquitously active EF1α promoter. The bidirectional SV40 poly-adenylation signal is used to terminate transcription. To avoid interference between the LCR/β-promoter and EF1α promoter, a 1.2 kb chicken HS4 chromatin insulator (Emery et al., Proc Natl Acad Sci USA, 97, 9150-9155, 2000) was inserted between the cassettes. (FIG. 64B) The treatment regimen is the same as shown in FIG. 57A. (FIG. 64C) Percentage of human γ-globin-positive cells in peripheral red blood cells (RBCs) measured by flow cytometry. (FIG. 64D) Percentage and (FIG. 64E) mean fluorescence intensity of human γ-globin-positive cells in erythroid (Ter119+) and non-erythroid (Ter119−) cells in blood and bone marrow at week 16 after in vivo transduction. *p<0.05. (FIG. 64F) Percentage of γ-globin chains relative to mouse β-major chains measured in RBCs at week 16 by HPLC. (FIG. 64G) Percentage of γ-globin mRNA relative to mouse β-major RNA measured in RBCs at week 16 by qRT-PCR. (FIG. 64H) Vector copy number per cell in colonies derived from Lin− cells. Each symbol represents the one colony. Differences between animals are not significant.

[0154] FIGS. 65A, 65B. Engraftment of AAVS1/CD46 Lin− cells transduced with HDAd-CRISPR and HDAd-globin-donor vectors. (FIG. 65A) Engraftment of transplanted cells based on human CD46 expression on PBMCs measured by flow cytometry. (FIG. 65B) Percentage of CD46-positive cells in lineage-positive PBMCs (blood), spleen, and bone marrow cells as well as bone marrow LSK cells at week 16.

[0155] FIGS. 66A-66C. Analysis of secondary recipients from FIGS. 64A-64H. Bone marrow cells from mice that were transplanted with HDAd-CRISPR+HDAd-globin-donor transduced Lin− cells were harvested at week 16 after transplantation, depleted for lineage-positive cells, and transplanted into lethally irradiated C57Bl/6 mice. (FIG. 66A) γ-globin flow cytometry of RBCs in five recipient mice. (FIG. 66B) Percentage of CD46-positive cells in lineage-positive PBMCs. (FIG. 66C) Bone marrow composition at week 16 after transplantation into secondary recipients.

[0156] FIGS. 67A-67H. In vivo transduction of AAVS1/CD46tg mice with HDAd-CRISPR+HDAd-globin-donor. (FIG. 67A) Treatment regimen. (FIG. 67B) Percentage of γ-globin-positive RBCs. (FIG. 67C) Representative dot pot showing the percentage of γ-globin expression in peripheral RBCs from untransduced control mice or mice at week 16 after transduction. (FIG. 67D) Mean fluorescence intensity of γ-globin in erythroid (Ter119+) and non-erythroid (Ter119−) cells in blood and bone marrow. *p<0.05. (FIG. 67E) Percentage of γ-globin chains relative to mouse β-major chains measured in RBCs at week 16 by HPLC. *p<0.05. (FIG. 67F) Percentage of γ-globin mRNA relative to mouse β-major RNA measured in RBCs at week 16 by qRT-PCR. *p<0.05. (FIG. 67G) Vector copy number per cell in colonies derived from Lin− cells from four responder mice. Each symbol represents one colony. Differences between animals are not significant. (FIG. 67H) Composition of lineage-positive cells in blood, spleen and bone marrow and LSK cells in bone marrow at week 16 after in vivo transduction.

[0157] FIGS. 68A-68D. Analysis of secondary recipients from FIG. 67A-67H. (FIG. 68A) Engraftment of transplanted cells based on human CD46 expression on PBMCs measured by flow cytometry. (FIG. 68B) γ-globin expression in RBCs. (FIG. 68C) Percentage of γ-globin chains relative to mouse β-major chains measured in RBCs of secondary recipients at week 16 by HPLC. (FIG. 68D) Lineage-positive cell composition in blood, spleen and bone marrow at week 16 after in vivo transduction.

[0158] FIGS. 69A, 69B. Localization and structure of the AAVS1 locus in AAVS1/CD46 transgenic mice. (FIG. 69A) TLA data showing mismatches on chromosome 14. An AAVS1-specific primer pair was used. The right panel shows an enlarged section of chromosome 14 with the 18 kb gap visible. The gap corresponds to the added human AAVS1 loci. (FIG. 69B)

[0159] FIG. 70. Detailed structure of the AAVS1 loci indicating the genomic localization. The shaded AAVS1 areas were confirmed by Sanger sequencing. The empty areas were deducted from restriction analysis and AAVS1 tg mice genetic background information from The Jackson Laboratory. The CRISPR/Cas9 cleavage sites are indicated by scissors. Repeats #2 to #5 are complete 8.2 kb human AAVS1 EcoRl fragments, while repeats #1 and #5 only contain only a fraction of the EcoRl fragment. Notably, repeat #5 lacks a complete 5′ homology arm. Outcome depending on CRISPR/Cas9 cleavage of the multicopy AAVS1 locus present in AAVS1tg mice. Rules regarding cutting positions are as follows: a) One single cut in repeat #1 to #4: preferred. b) One single cut in repeat #5: reduced preference due to incomplete left homology arm. c) Two cuts in two oppositely oriented repeats (e.g. #1 and #4): no HDR-mediated targeted integration due to missing right homology arm. d) Two cuts in two repeats facing the same direction (e.g. #1 and #2): preferred. e) For more than 2 cuts, only consider the one proximal to mouse gDNA sequence at each side: Apply rule c) or d) accordingly. f) Cuts in repeats #1 and #5 and deletion of the central region. In addition, HDR-mediated targeted integration occurred in repeat #2 to #4, continuous cutting in flanking repeats, for example #1 and #5, by CRISPR may result in loss of the already integrated transgene.

[0160] FIGS. 71A, 71B. Integration site analysis by Southern of genomic DNA isolated at week 16 after ex vivo or in vivo HSC transduction with HDAd-CRISPR+HDAd-GFP-donor. (FIG. 71A) Hybridization with an AAVS1-specific probe. The upper panel shows the expected EcoRl fragment size and the localization of the probe. The lower panel shows the analysis of individual mice from ex vivo and in vivo transduction setting. The larger bands represent non-targeted AAVS1 loci repeats. (FIG. 71B) Hybridization of BlpI-digested DNA with a GFP-specific probe. The band pattern is discussed elsewhere.

[0161] FIGS. 72A-72C. Integration site analysis by inverse PCR (iPCR) of genomic DNA isolated at week 16 after ex vivo or in vivo HSC transduction with HDAd-CRISPR+HDAd-GFP-donor. (FIG. 72A) The diagram shows the locations of NcoI sites, and primers (half arrows: EF1α primers for 5′ junctions; light gray: pA primers for 3′ junctions). The expected amplicon size at each side for targeted integration in repeat #5 is indicated. (FIG. 72B) iPCR results using genomic DNA from total bone marrow cells. Each lane represents one mouse. #009, #023, #943, #944 and #946 are mice after ex vivo HSC transduction. #147, #304 and #467 are in vivo transduced animals. (FIG. 72C) iPCR analysis of GFP-positive colonies. Bone marrow Lin− cells from week 14 mice were plated, genomic DNA was isolated from GFP+ colonies 20 days later and used for iPCR. Mice #943 and #946 were analyzed. Each lane represents one colony. Light gray arrow: targeted integration; dark gray arrow: off-target integration; medium gray arrow: integrated whole HDAd viral genome.

[0162] FIGS. 73A, 73B. Integration site analysis by inverse PCR (iPCR) of genomic DNA isolated at week 16 after ex vivo or in vivo HSC transduction with HDAd-CRISPR+HDAd-globin-donor. (FIG. 73A) The diagram shows the locations of NcoI sites, and primers (half arrows. black EF1α primers for 5′ junctions; gray: pA primers for 3′ junctions). The expected amplicon size at each side for targeted integration in repeat #5 is shown. (FIG. 73B) iPCR results using genomic DNA from total bone marrow cells. Each lane represents one mouse. #321, #322, #856, #857, #858 and #945 are mice with ex vivo transduction. #504, #816 #869 and #898 are in vivo transduced animals. White arrowhead indicates targeted integration; Gray, dotted lined arrowhead: off-target integration; white full arrow: integrated whole HDAd viral genome.

[0163] FIGS. 74A-74D. (FIG. 74A) HDAd5/35++ vectors for in vivo HSPC transduction. In HDAd-GFP/mgmt, the transposon is flanked by inverted transposon repeats (IR) and frt sites for integration through a hyperactive Sleeping Beauty transposase (SB100X) provided from the HDAd-SB vector. The transgene cassette contains a PGK-promoter driven GFP gene linked to a β-globin 3′UTR as well as an EF1α-promoter driven mgmtP140K cassette. Both cassettes are separated by a chicken globin HS4 insulator. HSPCs were mobilized in neu/CD46 transgenic mice by s.c. injections of human recombinant G-CSF (5 μg/mouse/day, 4 days) followed by an s.c. injection of AMD3100 (5 mg/kg) eighteen hours after the last G-CSF injection. A total of 8×1010 viral particles of HDAd-GFP/mgmt+HDAd-SB were injected i.v. one hour after AMD3100. To prevent pro-inflammatory cytokine release after HDAd injection, animals received Dexamethasone (10 mg/kg) i.p. 16 h and 2 h before virus injection. Six weeks later, three rounds of O6BG/BCNU (i.p.) were applied to activate the exit of transduced HSPCs into the peripheral blood circulation (30 mg/kg O6BG plus 5, 7.5, and 10 mg/kg BCNU). Seventeen weeks after in vivo transduction, 1×10⁶ MMC cells were implanted into the mammary fat pad. Five weeks later, tumors and other tissues were harvested and analyzed for GFP expression. (FIG. 74B) Left Panel: Percentage of GFP-expressing PBMCs at different time points after in vivo transduction. Each symbol represents an individual animal. Right Panel: Percentage of GFP+ cells in cells stained for the pan-leukocyte marker CD45 in bone marrow, spleen, blood, and collagenase/dispase-digested tumor. (FIG. 74C) Tumor section stained with an antibody against GFP and an antibody against laminin, an extracellular matrix protein. The scale bar is 50 μm. (FIG. 74D) Immunophenotyping of GFP+PBMCs in the blood and of GFP+ cells in the tumor.

[0164] FIG. 75. Rat Neu expression in MMC cells. Cells were stained with the Neu-specific monoclonal antibody 7.16.4 followed by anti-mouse Ig-FITC. Shown is a representative confocal microscopy image of cultured MMC cells. New-Specific signals appear in whiter hues. The scale bar is 20 μm.

[0165] FIG. 76. Gating strategy for immunophenotyping.

[0166] FIG. 77. Immunophenotyping of GFP+ cells in the bone marrow and spleen (MMC model). For details, see FIG. 74D.

[0167] FIGS. 78A-78F. GFP expression in tumor-infiltrating leukocytes after in vivo HSPC transduction (TC-1 model). (FIG. 78A) Schematic of the experiment. HSPCs were mobilized in CD46tg transgenic mice by s.c. injections of human recombinant G-CSF (5 mg/mouse/day, 4 days) followed by an s.c. injection of AMD3100 (5 mg/kg) eighteen hours after the last G-CSF injection. A total of 8×1010 viral particles of HDAd-GFP/mgmt+HDAd-SB were injected i.v. one hour after AMD3100. To prevent pro-inflammatory cytokine release after HDAd injection, animals received Dexamethasone (10 mg/kg) i.p. 16 h and 2 h before virus injection. Six weeks later, three rounds of O⁶BG/BCNU (i.p.) were applied to activate the exit of transduced HSPCs into the peripheral blood circulation (30 mg/kg O6BG plus 5, 7.5, and 10 mg/kg BCNU. 17 weeks after in vivo transduction, 5×10⁴ TC-1 cells were implanted into the mammary fat pad. Five weeks later, tumors and other tissues were harvested and analyzed for GFP expression. (FIG. 78B) Percentage of GFP-expressing PBMCs at different time points after in vivo transduction. Each symbol represents an individual animal. (FIG. 78C) Percentage of GFP+ cells in cells stained for the panleukocyte marker CD45 in bone marrow, spleen, blood, and collagenase/dispase-digested tumor. (FIG. 78D) Representative flow cytometry data of GFP+ cells in total (malignant+tumor infiltrating) cells and of GFP+positive leukocytes. (FIG. 78E). Representative tumor section. Left panel: GFP fluorescence. Right panel: staining with antibodies against GFP (white) and the extracellular matrix protein laminin (gray). The scale bar is 50 mm. (FIG. 78F) Immunophenotyping of GFP+ cells in the tumor and PBMCs in blood. Lymphocyte flow cytometry panel 8c (CD45, CD3, CD4, CD8, CD25, CD19) and myeloid panel 9c (CD45, CD11c, F4/80, MHCII, SiglecF-PecCP, Ly6C, CD11b, Ly6G) from BD Biosciences were used.

[0168] FIGS. 79A-79C. Selection of miRNAs for suppression in cells other than tumor-infiltrating leukocytes. (FIG. 79A) miRNA-based regulation of tissue-specificity of transgene expression. miRNAs function as guide molecules through base pairing with target sequences, referred to as miRNA Target Sites (miR-T), typically residing in the 3′ untranslated region (3′ UTR) of native mRNAs. This interaction recruits effector complexes mediating mRNA cleavage or translational repression. If the mRNA of a transgene contains miR-Ts for a miRNA that is expressed at high levels in a given cell type, transgene expression will be prevented in this cell type. In contrast, in cell types that do not express the specific miRNA, the transgene will be expressed (Brown et al., Nat Med. 2006; 12: 585-591). (FIG. 79B) MicroRNA-Seq was performed on RNA pooled from five mice (neu/CD46tg-MMC model, day 17 after tumor inoculation). Shown are normalized microRNA read counts (reads per million mapped microRNAs+1) identified by small RNA sequencing of spleen, bone marrow and blood versus GFP⁺ tumor 13 samples. MicroRNAs that are not present in the tumor, including miR-423, align at the left of the scatterplot with a pseudo-count of 1. miR-423-5p is indicated in the blot. (FIG. 79C) MicroRNA-Seq was performed on RNA pooled from five mice (CD46tg/TC-1 model, day 17). Relative expression level of the top 10 miRNAs compared to levels in the tumor (set to 1).

[0169] FIGS. 80A-80C. Effect of miR-423-5p target site overexpression on HSPCs. (FIG. 80A) Vector structure. HDAd-GFP-miR-423 contains four miR-423-5p target sites in the 3′UTR linked to the GFP gene. (FIG. 80B) Mouse HSPCs (M) (Lin− cells from the bone marrow of CD46-transgenic mice) and human HSPCs (Hu) (CD34+ cells) were infected with either HDAd-GFP or HDAd-GFP-miR423 at a MOI of 500 or 3000 vp/cell, respectively. Three days later, cell lysates were analyzed by Western blot for CDKNIA. Blots were re-probed with anti-β-actin antibodies to adjust for loading differences. The right panel shows the quantification of CDKNIA signals normalized to b-actin signals. The signals from the corresponding mouse and human HDAd-GFP/mgmt samples were taken as 100%. (FIG. 80C) Effect on progenitor colony formation. One day after HDAd infection, mouse Lin⁻ cells (2.5×10³ cells per 35 mm dish) or human CD34+ cells (3×10³ cells/dish) were plated for colony assays. Colonies were counted 12 days later. N=3. *p<0.05. Statistical significance was calculated by two-sided Student's t-test (Microsoft Excel). (In agreement with previous studies (Li et al., Mol Ther Methods Clin Dev. 2018; 9: 390-401; Li et al., Mol Ther Methods Clin Dev. 9: 142-152, 2018), infection of HSPCs at relatively high MOIs slightly reduced the colony forming capacity of HSPCs.)

[0170] FIG. 81. Validation of miR-423-5p expression by Northern blot. Total RNA (2 μg) from bone marrow lineage-negative cells, spleen, total blood cells, and MMC-/TC-1-tumor infiltrating leukocytes was separated in 15% denaturing polyacrylamide gel and blots were hybridized with a probe specific for muRNA-423-5p and subsequently with a probe for U6 RNA (as loading control). Mir-423 has a precursor length of 70 bp and a mature miRNA length of 23 bp. miR-423-5p-specific signals are visible for blood, bone marrow, and spleen, but absent in tumor-infiltrating cells in both tumor models.

[0171] FIGS. 82A, 82B. miRNA423-5p expression in humans. (FIG. 82A) Levels of miR-423-5p published in Ludwig et al., Nucleic Acids Res. 2016; 44: 3865-3877. From left to right, y-axis label includes: adipocyte, artery, colon, dura mater, kidney, liver, lung, muscle, myocardium, skin, spleen, stomach, testis, thyroid, small intestine duodenum, small intestine jejunum, pancreas, kidney glandula suprarenalis, kidney cortex renalis, kidney medulla renalis, esophagus, prostate, bone marrow, vein, lymph node, pleura, brain pituitary gland, spinal cord, brain thalamus, brain white matter, brain nucleus caudalus, brain gray matter, brain cerebral cortex temporal, brain cerebral cortex frontal, brain cerebral cortex occipital, and brain cerebellum. (FIG. 82B) Plotted miRNA-Seq data from two ovarian cancer patients (pooled). CD45+ cells were isolated from biopsies of high-grade serous ovarian. RNA was isolated from tumor-infiltrating leukocytes and matching PBMCs and subjected to miRNA-Seq by LC Sciences, LLC. miRNA-423-5p is indicated.

[0172] FIGS. 83A-83E. In vivo HSPC αPD-L1-γ1 immune-checkpoint inhibitor therapy in the neu/MMC model. (FIG. 83A) PDL1 expression (white) in MMC tumor cells. The scale bar is 20 μm. (FIG. 83B) The overall structure of the therapy vector is the same as shown in FIG. 74A. The vector contains the expression cassettes for a scFv anti-mouse PD-L1 linked to a HA tag and secretion signal (LS) on the 5′ end and to the hinge-CH2-CH3 domains of human IgG1 and myc tag on the 3′ end. miR423-5p target sites were inserted into the 3′UTR to restrict αPD-L1-γ1 expression to tumor-infiltrating cells by miR423-5p regulation. The vector also contains an expression cassette for mgtm^{P140K}. (FIG. 83C) Tumor volumes after MMC cell inoculation (day 0) in mice with HDAd-GFP/mgmt and HDAd-αPD-L1-γ1 in vivo transduced HSPCs. Mice in the HDAd-αPD-L1-γ1 group were re-challenged by a subcutaneous injection of 1×10⁵ MMC cells at day 80 after the first tumor cell injection. Each curve is an individual animal. (FIG. 83D) Analysis of T-cell responses by flow cytometry. Splenocytes from naïve neu-transgenic mice and HDAd-αPD-L1-yl-treated mice (day 100) were analyzed by flow cytometry for CD4, CD8, and intracellular IFNγ or stained with the Neu tetramer. N=3. *p<0.05. (FIG. 83E) IFNγ response upon stimulation with Neu+ and Neucells. Splenocytes from naïve neu-transgenic mice and HDAd-αPDL1-γ1-treated mice (day 100) were exposed to arrested MMC cells (Neu+) or splenocytes from neutransgenic mice (Neu-), or treated with PMA/ionomycin (“noAg”). Shown is the IFNγ concentration in culture supernatants. N=3. *p<0.005.

[0173] FIGS. 84A-84C. Kinetics of αPD-L1-γ1 expression. (FIG. 84A) αPD-L1-γ1 Western blot with anti-HA tag antibodies. Three animals were sacrificed at day 17 and tissues were analyzed for αPD-LI-γ1 expression by Western blot. αPD-L1-γ1 protein was not completely reduced, resulting in remnants of complete αPD-L1-γ1 with two scFv chains (130 kDa) (see right panel for the structure of αPD-L1-yl). Staining for β-actin was used for loading controls. Shown are representative samples. Also shown is quantification of Western blot signals. N=5 mice. (FIG. 84B) αPD-L1-γ1 mRNA expression in tumor-infiltrating leukocytes, PBMCs, bone marrow cells and splenocytes. Mouse PPIA mRNA was used as an internal control. Results were calculated according to the 2(−ΔΔCt) method and presented as percentage of relative expression, with setting the cDNA level of corresponding tumor samples as 100%. (FIG. 84C) Levels of secreted αPD-L1-γ1 in the serum measured by ELISA using recombinant mouse PD-L1 for capture and an anti-HA antibody-HRP conjugate for detection. Each symbol represents an individual animal. *p<0.05. Statistical significance was calculated by two-sided Student's t-test (Microsoft Excel).

[0174] FIGS. 85A-85F. Immuno-prophylaxis study in the ID8-p53^{-/-} brca2^{-/-} ovarian cancer model. (FIG. 85A) Analysis of ID8-p53^{-/-} brca2^{-/-} tumors. A total 2×10⁶ ID8-p53^{-/-} brca2^{-/-} cells were injected intraperitoneally into CD46-transgenic mice. Ascites/cachexia developed 6-8 weeks later. Tumors were then removed and digested with dispase/collagenase for flow cytometry. A fraction of cells was sorted for tumor-associated macrophages (TAMs), neutrophils (TANs), and T-cells (TILs) for Northern blot analysis. (see FIG. 76). (FIG. 85B) Immunophenotyping of tumor-associated leukocytes. (FIG. 85C) Northern blot for miR-423-5p. A total of 1 μg of RNA was loaded per lane. The upper panel shows signals after probing with a ³²P-labeled miR-423-5p probe. The blot was stripped and re-probed with a U6 RNA specific probe (lower panel). The ³²P-labeled Decade marker from Ambion was run in the right lane. (FIG. 85D) Experimental scheme. CD46-transgenic mice were mobilized and injected either with HDAd-αPDL1γ1miR423+HDAd-SB, HDAd-GFP-miR423+HDAd-SB, or mock-injected. Four rounds of O⁶BG/BCNU in vivo selection were given. ID8-p53^{-/-} brca2^{-/-} cells were injected intraperitoneally two weeks after the last O⁶BG/BCNU treatment. Two, six, and eleven weeks after tumor cell injection, αPDL1γ1 levels were analyzed in serum. The onset of ascites or morbidity/cachexia were taken as endpoints. (FIG. 85E) Kaplan-Meier survival plot. N=7. (FIG. 85F) Serum αPDL1γ1 levels measured by ELISA. Each symbol is an individual animal. *p<0.05. Statistical significance was calculated by two-sided Student's t-test (Microsoft Excel).

[0175] FIGS. 86A-86D. Immuno-therapy study in the ID8-p53^{-/-} brca2^{-/-} ovarian cancer model. (FIG. 86A) Clinical setting to prevent cancer recurrence. In vivo HSC transduction will start after surgical tumor debulking or, if surgery is not an option, together with chemotherapy. O⁶BG/BCNU in vivo selection can be combined with chemotherapy. As a result of in vivo HSPC transduction/selection, armed HSPCs will lay dormant until cancer recurs which will trigger HSPC differentiation and activation of effector gene expression. (FIG. 86B) Experimental scheme. CD46 transgenic mice were intraperitoneally injected with 1×10⁶ ID8-p53^{-/-} brca2^{-/-} tumor cells. Once tumors were established, in vivo HSPC transduction and selection were performed. Activation of miR-423-based expression system was monitored based on serum αPDL1γ1 levels. (FIG. 86C) Kaplan-Meier survival plot. In the control setting, HDAd-GFP-miR423 was injected. N=9. (FIG. 86D) Serum αPDL1γ1 levels were measured by ELISA. Each symbol is an individual animal. *p<0.05. Statistical significance was calculated by two-sided Student's t-test (Microsoft Excel).

[0176] FIGS. 87A, 87B. Autoimmune reactions in animals sacrificed at day 17 at the peak of αPD-L1-γ1, before reversal of tumor growth. (FIG. 87A) Fur discoloration in a treated animal (right panel) compared to an animal before treatment (left panel). (FIG. 87B) Histological analysis of organs from a treated animal. Sections were stained with H&E. Shown are representative areas. The scale bar is 20 mm. Note the infiltrates of mononuclear cells.

[0177] FIGS. 88A-88H. Effect of anti-PD-L1 monoclonal antibody therapy in neu-transgenic mice with MMC tumors and effect of in vivo HSC transduction on hemopoiesis. When tumors reached a volume of 100 mm³, mice received intraperitoneal injections of the anti-mouse PD1-L1 monoclonal antibody muDX400* (5 mg/kg i.p.) (4× every 4 days) or an isotype control antibody. (FIG. 88A) Shown is the tumor volume in individual mice. (FIG. 88B) Kaplan-Meier survival plot, showing longer survival with anti-PD-L1. Tumors with a volume of 1000 mm³ were taken as endpoint. The difference between the two groups is not significant. (FIG. 88C) Blood cell counts in hCD46-transgenic mice shown in FIG. 85D at week 2 after in vivo HSCPC transduction (FIG. 85A) Hematological parameters. RBC: red blood cells, Hb: hemoglobin, MCV: mean corpuscular volume, MCH: mean corpuscular hemoglobin, MCHC: mean corpuscular hemoglobin concentration, RDW: red cell distribution width. Statistical analysis was performed using two-way ANOVA. The differences between the three groups were not significant. (FIG. 88E) niRNA-Seq of GFP+ cell fractions. (FIG. 88F) Kinetics of αPDL1 expression by western blot, qRT-PCR, and serum ELISA. (FIG. 88G) miRNA-regulated gene expression. (FIG. 88H) a summarized schematic of disclosed immune-prophylactic and cancer recurrence prevention.

[0178] FIGS. 89A-89H. Data related to GFP expression from erythrocytes.

[0179] FIGS. 90A-90I. Data related to human factor VIII expression from erythrocytes.

[0180] FIGS. 91A-91D. No hematological abnormalities are observed.

[0181] FIGS. 92A-92G. Phenotypic correction of hemophilia A in spite of inhibitor antibodies.

[0182] FIGS. 93A-93E. In vivo transduction in macaques (M. fascicularis). (FIG. 93A) experimental timeline; (FIGS. 93B-93D) GFP marking in mobilized CD34+ cells in peripheral blood; (FIG. 93E) bone marrow (Day 3).

[0183] FIGS. 94A-94M. Combined in vivo HSC. transduction selection. mgmt^{P140K} provides a mechanism for drug resistance and the selective expansion of gene-modified cells. (P140K mutant of human O(6)-methylguanine-DNA-methyltransferase (MGMT) confers resistance to the MGMT inhibitor O(6)-(4-bromothenyl) guanine (O6BG) also known as benzylguanine. (FIG. 94A) Vector for MGMT^{p140k}. (FIG. 94B) Experimental design showing timeline and dosages for injections. (FIG. 94C) Data showing percent of GFP+ cells in PBMC. (FIG. 94D) Data showing percent of GFP+ cell in bone marrow at week 26. (FIG. 94E) Ad5/35-GFP vector. (FIG. 94F) Experimental protocol depicting Pigtail macaques received 4 days of mobilization followed by Ad5/35 injection. (FIG. 94G) Animal IDs and doses of G-CSF, SCF, AMD3100, and Ad5/35-GFP. (FIG. 94H) AMD3100 increased total CD34+ stem cell levels three-fold better than G-CSF/SCF alone and 65-fold over baseline; left panel showed percentage of CD34+ stem cells in peripheral blood; right panel shows CD34+ cell counts. (FIG. 94I) Mobilized cells after AD5/35 injection form healthy colonies without lineage skewing; left panel provides numerical data showing the frequency and number of colonies zero to six hours post Ad5/35 injection; right panel provides visual inspection of morphology of CD34+ cells. (FIG. 94J) Top panel shows flow cytometry data of the Ad5/35-GFP cells from zero to 6 hours post injection. Bottom panel shows the numerical data of the number of colonies containing Ad5/35-GFP at zero, two, and six hours post injection. (FIG. 94K) Over 3% of peripheral CD34+ cells express GFP following Ad5/35 injection. Top panel depicts C34+ cells extracted from the mononuclear cell (MNC) layer from zero to 8 days post Ad5/35 injection. Bottom panel depicts the average GFP⁺ expression 2 and 6 hours post injection. (FIG. 94L) Multiple methods confirm successful transduction of circulating cells after mobilization and Ad5/35 injection. Left panel depicts Taqman detection of vector DNA. Right panel depicts flow cytometry data of GFP expression. (FIG. 94M) Modified cells home back to bone marrow. Left panel depicts flow cytometry data showing the change in CD34+ and GFP+ cells at day three, seven, and 73 post Ad5/35 injection. Right panel depicts the percent of GFP+, CD34+ cells at baseline, and three, seven, and 73 days post Ad5/35 injection.

[0184] FIG. 95. Features of representative Ad35 helper virus and vectors described herein. The five-point star indicates the following text: —combination (addition and reactivation) for SB100x and targeted; —multiple sgRNAs for CRISPR or BE; —miRNA (miR187/218) regulated expression of Cas9; and -auto-inactivation of Cas9.

[0185] FIG. 96. Schematic of HDAd-Tl-combo vector. The CRISPR system targets two different sites (HBG promoter and erythroid bcl11a enhancer), which leads to increased gamma reactivation.

[0186] FIGS. 97A-97D. (FIG. 97A). Upon co-infection of HDAd-SB and HDAd-combo, Flpe will be expressed and release the IR-flanked transposon, which will then be integrated into the genome by SB100x transposase. Simultaneously, HBG1 and bcl11a-E CRISPRs will be expressed and generate DNA indels that will lead to reactivation of [symbol] -globin. Upon Flp-mediated release of the transposon, the CRISPR cassette will be degraded, thereby avoiding cytotoxicity. The CRISPR system targets two different sites (HBG promoter and erythroid bcl11a enhancer), which leads to increased γ reactivation. (FIG. 97B) targeting strategy; (FIG. 97C) erythroid specific BCL11A enhancer; (FIG. 97D) BCL11A binding site at HBG promoter (SEQ ID NO: 48). Schematic of HDAd-SB and HdAd-comb-SB can be found in FIG. 102.

[0187] FIGS. 98A-98N. Dual CRISPR vectors and γ-globin reactivation. (FIG. 98A) Vector designs for HDAd-Bclllae-CRISPR, HDad-HBG-CRISPR, HDAd-Dual-CRISPR, and HDAd-scrambled. (FIG. 98B) HD-Ad5/35++CRISPR Vectors for dual gRNA vector. (FIG. 98C) HD-Ad5/35++CRISPR transduction of a human erythroid progenitor cell line (HUDEP-2) is shown before and after differentiation. The timeline is shown below HUDEP-2 cell images. (FIG. 98D) The HD-AD5/35++“Dual” gRNA vector does not negatively affect cell viability compared to untreated (UNTR), BCL11A, or HBG vectors. (FIG. 98E) The HD-AD5/35++“Dual” gRNA vector does not negatively affect proliferation compared to UNTR, BCL11A, or HBG vectors. (FIG. 98F, FIG. 98G) The Dual vectors achieve similar editing levels similar to those observed with the single gRNA vectors for the target loci (FIG. 98F) Bcl11a enhancer and (FIG. 98G) HBG promoter. (FIG. 98H) The HD-AD5/35++“Dual” gRNA vector achieves editing levels of target loci similar to those observed with the single gRNA vectors. (FIG. 98I) A significantly higher percentage of HbF+ cells were observed by flow cytometry in HUDEP-2 cells transduced with the HD-Ad5/35 “Dual” gRNA vector compared to the single gRNA vectors. A bar chart summarizing flow cytometry data is below the flow cytometry data. (FIG. 98J) The overall gamma globin expression, measured by HPLC, was significantly higher in the dual targeted samples. (FIG. 98K) A significantly higher fetal globin expression in double knock-out clones than single knock-out clones was observed implying a possible synergistic effect of the two mutations, leading to higher gamma expression/cell. (FIG. 98L) Schematic shows that peripheral blood mobilized CD34+ cells were transduced with the HDAd5/35++ CRISPR vectors. To minimize CRISPR/Cas9 cytotoxicity, cells were subsequently transduced with an HDAd5/35++ vector that expresses anti-Cas9 peptides. Cells were transplanted into sub-lethally irradiated NSG mice and analyzed. (FIG. 98M) At week 10 after transplantation, cells transduced with the HD-Ad5/35 “Dual” gRNA vector exhibited similar engraftment to the cells transduced with the single gRNA vectors. Lineage composition was similar in all groups. (FIG. 98N) CD34+ cells transduced and edited by the double gRNA vector, efficiently engrafted in NSG mice. Furthermore, the engrafted dual targeted cells after erythroid differentiation expressed higher levels of gamma globin to the control, compared to the single targeted cells, despite the relatively lower editing levels.

[0188] FIGS. 99A-99U. Ex vivo transduction of double edited normal and that CD34+ cells. (FIG. 99A) Experimental design. (FIG. 99B) HBF expression and (FIG. 99C) MFI in colonies on day 15 for normal CD34+ cells. * indicates that p=0.034. (FIG. 99D) Flow cytometry data describing HBF expression in colonies on day 15 in normal CD34+ cells. (FIG. 99E) HBF expression and (FIG. 99F) MFI after erythroid differentiation (ED) for normal CD34+ cells. * indicates that p=0.01. (FIG. 99G) TE71 for HBG site and (FIG. 99H) TE71 for BCL11A site 48 hours post transduction (txd) in normal CD34+ cells. (FIG. 99I) Flow cytometry data describing HBF expression in EC and erythroid differentiation. (FIGS. 99J-99U) ThaI CD34+ cells. (FIG. 99J) Immunophenotype of cells at day 0, untransduced cells and cells transduced with CRISPR-Dual and (FIG. 99K) a growth curve comparing untransduced cells and cells transduced with CRISPR-Dual over 11 days. (FIG. 99L) HBF expression and (FIG. 99M) MFI in colonies on day 15. ** indicates that p=0.0046. (FIG. 99N) HBF expression in erythroid and myeloid compartment comparing CRISPR-Dual versus untransduced cells. (FIG. 99O) HBF expression in erythroid and myeloid compartment comparing CRISPR-Dual A and B versus untransduced cells. (FIG. 99P) HBF expression in EC and (FIG. 99Q) MFI. *** indicates that p=0.0003 and **** indicates that p=0.00003. (FIG. 99R) Flow cytometry data describing HBF expression at PO4 and P18. (FIGS. 99S, 99T) TE71 for HBG site erythroid differentiation at (FIG. 99S) p04 and (FIG. 99T) p18. (FIG. 99U) TE71 for BCL11A site 48 hours after transduction.

[0189] FIG. 100. Graphical summary describing the combination of γ-globin gene addition and re-activation of endogenous γ-globin.

[0190] FIG. 101. HDAd5/35++ vectors used herein. γ-globin gene addition is achieved through the SB100x transposase system consisting of a transposon vector with IRs and frt sites flanking the expression cassette (see HDAd-combo and HDAd-SB-addition) and a second vector (HDAd-SB) that provides the SB100x and Flpe recombinase in trans. The transposon cassette for random integration consists of a mini β-globin LCR/promoter for erythroid specific expression of human γ-globin. The 3′UTR serves for mRNA stabilization in erythroid cells. The γ-globin expression unit is separated by a chicken globin HS4 insulator from a cassette for mgmt^{P140K} expression from a ubiquitously active PGK promoter. The CRISPR/Cas9 cassette in the HDAd-CRISPR and HDAd-combo vectors contains a U6 promote-driven sgRNA specific to the BCL11A binding site within the HBG1/2 promoter, a SpCas9 under EF1 a promoter control. Expression of Cas9 in HDAd producer cells is suppressed by a miRNA regulation system (Saydaminova et al., Mol Ther Methods Clin Dev. 2015, 1: 14057, 2015). In HDAd-combo, the CRISPR/Cas9 cassette is placed outside the transposon so that it will be lost upon Flpe/SB100x-mediated integration (see FIG. 102).

[0191] FIG. 102. Schematic for controlled Cas9 expression. In HDAd-combo, the interaction of Flpe recombinase with the frt sites leads to a circularization of the transposon, leaving linear fragment of the vector containing the CRISPR cassette. Previous studies with the SB100x/Flpe system demonstrated that these vector parts are rapidly lost while the circularized transposon is integrated into the host genome by SB100x (Yant et al., Nat Biotechnol., 20: 999-1005, 2002).

[0192] FIGS. 103A-103D. In vitro studies with HUDEP-2 cells to analyze Cas9 and γ-globin expression. (FIGS. 103A and 103B) Analysis of Cas9 expression by Western blot. HUDEP-2 cells were transduced with HDAd-combo alone and in combination with HDAd-SB (i.e. the vector that provides Flpe and SB100x in trans). In vitro erythroid differentiation was started 4 days post transduction and continued for 8 days. (Erythroid differentiation allows for γ-globin expression). Right panel: representative Western blot using Cas9 and β-actin antibodies as probes. Left panel: Summary of the Cas9 signals. The bars compare Cas9 with and without HDAd-SB coinfection, i.e. the reduction of Cas9 by the Flpe/SB100x mechanism. (FIG. 103C) Analysis of γ-globin expression by flow cytometry. HUDEP-2 cells were transduced with HDAd-CRISPR (“cut”), HDAd-SB-add (“add”)+HDAd-SB, or HDAd-combo (“combo”)+HDAd-SB and analyzed at the indicated time points. (FIG. 103D) γ-globin mRNA levels by qRT-PCR. d.p.t., days post transduction. Diff, differentiation. *p<0.05

[0193] FIGS. 104A-104H. γ-globin expression studies after in vivo transduction of CD46/f3-YAC mice. (FIG. 104A) Schematic of the experiment. HSPCs were mobilized by subcutaneous (s.c.) injections of human recombinant G-CSF for 4 days followed by one s.c. injection of AMD3100. 30 and 60 minutes after AMD3100 injection, animals were intravenously injected with a 1:1 mixture of the following HDAd vectors (2 injections, each 4×10¹⁰ vp): HDAd-combo+HDAd-SB, HDAd-SB-add+HDAd-SB, and HDAd-cut. Mice were treated with immunosuppressive (IS) drugs for the next 4 weeks to avoid immune responses against the human γ-globin and MGMT. At week 4, 0⁶-BG/BCNU treatment was started and repeated every 2 weeks for 3 times. With each cycle, the BCNU concentration was increased from 5 mg/kg, to 7.5 mg/kg, to 10 mg/kg. At week 18 animals were sacrificed for tissue sample analysis and harvest of bone marrow Lin⁻ cells for secondary transplantation into lethally irradiated C57Bl/6 mice, which were then followed for another 16 weeks. (FIG. 104B) Detection of γ-globin expression in peripheral red blood cells by flow cytometry for the “combo” and “cut” groups. (FIG. 104C) γ-globin protein levels measured by HPLC. Right panel: Chromatogram of RBC lysates (week 18) with human β-globin, reactivated human Ay, and added γ-globin chains marked. Left panel: Summary of HPLC data. Shown is the percentage of total γ-globin relative to human β-globin for CD46/β-YAC mice treated with the “cut”, “add”, and “combo” vector. *: p<0.05, n.s. (FIG. 104D) γ-globin mRNA expression relative to mouse β-major mRNA expression (measured by qRT-PCR). (FIG. 104E) Percent target site cleavage by CRISPR/Cas9. Genomic DNA from PBMCs and bone marrow MNCs harvested at week 18 from in vivo “cut” and “combo” transduced mice were subjected to T7E1 assay. Shown is the summary of data from FIG. 105. *p<0.05). (FIG. 104F) Integrated vector copy numbers measured in bone marrow HSPCs at week 18 after transduction with the “add” and “combo” vectors. The difference between the groups is not significant. (FIG. 104G) Spectrum of VCNs in individual CFU's from “combo” vector treated mice. Bone marrow Lin⁻ cells were plated for progenitor assays and VCN was measured in individual colonies by qPCR. Shown are data from four different mice. (FIG. 104H) Human γ/human β globin protein by HPLC.

[0194] FIG. 105. Chromatograms of RBC lysates with marked human β- and γ-globin peaks. Upper panel shows β-YAC mice before treatment. Middle panels show week 18 after HDAd-CRISPR (“cut”) transduction. The left panel shows the reactivation of both Gγ and Aγ. Lower panels show week 18 after HDAd-CRISPR (“cut”) transduction. The peaks are labeled in the last bottom panel. Each chromatogram is an individual animal. Note that human β-globin decreases with increased and γ-globin (reverse globin switch).

[0195] FIG. 106. T7EI assay data from MNCs from blood, spleen, and bone marrow at week 16 after transduction with “cut” and “combo” vectors. The specific CRISPR/Cas9 cleavage fragments (255 and 110 bp) are marked by arrows. The percentage of cleavage based on band signal quantification is shown below each lane.

[0196] FIGS. 107A-107F. Analysis of secondary recipients of Lin⁻ cells from CD46/β-YAC transduced mice. (FIG. 107A) Percentage of human γ-globin expressing peripheral blood RBCs at the indicated time points. All mice received immunosuppression starting from week 4 post-transplantation. (FIG. 107B) Level of γ-globin protein relative to human β-globin at week 16 after transplantation. (FIGS. 107C and 107D) Level of γ-globin protein relative to mouse βₘₐⱼₒᵣ-globin and human β-globin. (FIG. 107E) Lineage-positive cell composition in MNCs of blood, spleen, and bone marrow at week 16 after transduction with the “combo” vector compared to untransduced control mice. FIG. 107F. Vector copy number per cell in total leukocytes from HDAd-combo group measured by qPCR using γ-globin primers.

[0197] FIGS. 108A-108D. Generation and characterization of triple transgenic CD46/Townes mice as a model for SCD. (FIG. 108A) Breeding of CD46/Townes mice. Townes mice (hα/hα::β^{S}/β^{S}) were bred over three rounds with CD46 transgenic mice. Animals that were homozygous for CD46, HbS and HBA were used for in vivo transduction studies. (FIG. 108B) Peripheral blood smear of CD46/Townes mice with typical features of the human disease, including anisopoikilocytosis, polychromasia (black arrows), sickled and fragmented cells (black arrows with a star) The scale bar is 15 μm. (FIG. 108C) Hematological analysis of peripheral blood from CD46/Townes mice compared to parental “healthy” CD46-transgenic mice. Ret: reticulocytes; RBC: red blood cells, Hb: hemoglobin; HCT: hematocrit; WBC: white blood cells. All differences are significant (p<0.05). (FIG. 108D) Splenomegaly in CD46/Townes mice. Shown is the ratio of spleen to body weight in CD46tg and CD46/Townes mice. N=3.

[0198] FIGS. 109A-109F. γ-globin expression after in vivo HSPC transduction of CD46/Townes mice. Mice were mobilized, HDAd-combo+HDAd-SB injected, and treated with O⁶BG/BCNU as described for FIG. 104. (FIG. 109A) γ-globin marking in peripheral RBCs measured by flow cytometry. The empty squares show marking in RBCs of untreated CD46/Townes mice. The vertical arrows indicate in vivo selection cycles. (FIG. 109B) γ-globin levels in RBCs measured at week 13 by HPLC. Left Panel: Summary of total γ-globin levels relative to human α-globin and β^{S}-globin chains in individual mice. The empty squares show levels in RBCs of untreated CD46/Townes mice. Right panel: Representative chromatograms of CD46/Townes mice before treatment (upper panel) and at week 13 after in vivo HSPC transduction with HDAd-combo+HDAd-SB. The peaks for human β-, β^{S}, reactivated Aγ, and added γ-globin are indicated. (FIG. 109C) Percentage of re-activated Ay based on HPLC. (FIG. 109D) Percentage of total γ-globin mRNA relative to human α-globin and β^{S}-globin mRNA in individual mice. (FIG. 109E) Integrated vector copy numbers measured in bone marrow HSPCs at week 163 after transduction with HDAd-combo. (FIG. 109F) HBG1/2 target site cleavage total bone marrow nuclear cells, Lin⁻ cells, PBMCs, and splenocytes of CD46/Townes mice at week 13 after injection of HDAd-combo. The specific CRISPR/Cas9 cleavage fragments (255 and 110 bp) are marked by arrows. The percentage of cleavage based on band signal quantification is shown below each lane.

[0199] FIGS. 110A, 110B. Analysis of secondary recipients transplanted with Lin⁻ cells from transduced CD46/Townes mice. (FIG. 110A) Percentage of human γ-globin expressing peripheral blood RBCs. (FIG. 110B) Level of γ-globin protein relative to human α- and β_{S} globin at week 16 after transplantation.

[0200] FIGS. 111A-111C. Phenotypic correction in blood. (FIG. 111A) Blood smears stained for reticulocytes by Brilliant cresyl blue. This dye stains remnants of nuclei and cytoplasmic compartments. (A quantification can be found in FIG. 109C, first group of bars). The scale bar is 20 μm. (FIG. 111B) Blood smears showing the normocytic morphology of erythrocytes after HDAd-combo gene therapy. (FIG. 111C) Hematological analysis of peripheral blood. The differences between “CD46” and “CD46/Townes wk13 after combo” are not significant.

[0201] FIGS. 112A-112C. Phenotypic correction in spleen and liver. (FIG. 112A) Tissue histology. Upper panel: iron deposition in spleen. Hemosiderin was detected in spleen sections by Perl's Prussian blue staining. The scale bar is 20 μm. Middle and lower panels: extramedullary hemopoiesis by hematoxylin/eosin staining in spleen and liver sections. Clusters of erythroblasts in the liver and megakaryocytes in the spleen of CD46/Townes mice are indicated by white arrows. The scale bars are 20 μm. Representative images are shown. (FIG. 112B) Spleen size, a measurable characteristic of compensatory hemopoiesis, in treated CD46/Townes mice is comparable to paternal CD46 mice. (FIG. 112C) 4-fold larger magnification of liver section images from FIG. 112A. Sickled RBCs trapped a liver sinusoid of CD46/Townes mice before treatment (left panel) and absence of sickled erythrocytes in liver sinusoids after treatment (right panel).

[0202] FIG. 113. The left end of Ad5/35 helper virus genome. The sequences shaded in dark grey correspond to the native Ad5 sequence, i.e., the unshaded or light grey highlighted sequences were artificially introduced. The sequences highlighted in light grey are 2 copies of the (tandemly repeated) loxP sequences. In the presence of “cre recombinase” protein, the nucleotide sequence between the two loxP sequences are deleted (leaving behind one copy of loxP). Because the Ad5 sequence between the loxP sites is essential for packaging the adenoviral DNA into capsids (in the nucleus of the producer cell), this deletion results in the helper adenovirus genome DNA not to be packageable. Consequently, the efficiency of the deletion process has a direct influence of the level of packaged helper genomic DNA (the undesired helper virus “contamination”). In view of the above, in order to translate the same scheme to adenovirus serotypes other than Ad5, it is desirable to achieve the following: 1. Identify the sequences that are essential for packaging, so that they can be flanked by loxP sequence insertions and deleted in the presence of cre recombinase. Identification of these sequences is not straightforward if there is little similarity in sequences. 2. Determine where in the native DNA sequence the insertion of loxP sequence would have the least effect for the propagation and packaging of helper virus (in the absence of cre recombinase). 3. Determine the spacing between the loxP sequences to allow for efficient deletion of packaging sequences and keeping helper virus packaging to a minimum during the production of helper-dependent adenovirus (i.e., in a cre recombinase—expressing cell line such as the 116 cell line).

[0203] FIG. 114. Alignment of Ad5 and Ad35 packaging signals (SEQ ID NOs: 49 and 50). The alignment of the left end sequences of Ad5 with Ad35 help in identifying packaging signals. The motifs in the Ad5 sequence that are important for packaging (A1 through AV) are in boxes (see FIG. 1B of Schmid et al., J Virol., 71(5):3375-4, 1997). The location of the loxP insertion sites are indicated by black arrows. It is seen that the insertions flank AI to AIV and disrupt AV. Please note that the additional packaging signal AVI and AVII, as indicated in Schmid et al., have been deleted in the Ad5 helper virus as part of the E1 deletion of this vector.

[0204] FIG. 115. Schematic of pAd35GLN-5E4. This is the first-generation (E1/E3-deleted) Ad35 vector derived from a vectorized Ad35 genome (Holden strain from the ATCC) using a recombineering technique (PMID: 28538186). This vector plasmid was then used to insert loxP sites.

[0205] FIG. 116. Information on plasmid packaging signals. The packaging site (PS)1 LoxP insertion sites are after nucleotide 178 and 344. This should remove AI to AIV. The rest of the packaging signal including AVI and AVII (after 344) has been deleted (as part of the E1 deletion (345 to 3113)). The PS2 LoxP insertion sites are after nucleotide 178 and 481. Additionally, nucleotides 179 to 365 have been deleted, so AI through AV are not present. The remaining packaging motifs AVI and AVII are removable by cre recombinase during HDAd production. The E1 deletion is from 482 to 3113. The PS3 LoxP insertion sites are after nucleotide 154 and 481. Three engineered vectors could be rescued. The percentage of viral genomes with rearranged loxP sites was 50, 20, and 60% for PS1, PS2, and PS3, respectively. Rearrangements occur when the lox P sites critically affected viral replication and gene expression. Vectors with rearranged loxP sites can be packaged and will contaminate the HDAd prep. SEQ ID NOs: 286, 51, and 52 exemplify the vectors diagramed as PS1, PS2, and PS3, respectively.

[0206] FIG. 117. Next generation HDAd35 platform compared to current HDAd5/35 platform. Both vectors contain a CMV-GFP cassette. The Ad35 vector does not contain immunogenic Ad5 capsid protein. Shows comparable transduction efficiency of CD34+ cells in vitro. Bridging study shows comparable transduction efficiency of CD34+ cells in vitro. Human HSCs, peripheral CD34+ cells from G-CSF mobilized donors were transduced with HDAd35 (produced with Ad35 helper P-2) or a chimeric vector containing the Ad5 capsid with fiber from Ad35, at MOIs 500, 1000, 2000 vp/cell. The percentage of GFP-positive cells was measured 48 hours after adding the virus in three independent experiments. Notably, infection with HDAd35 triggered cytopathic effect at 48 hours due to helper virus contamination.

[0207] FIG. 118. The PS2 helper vector was remade to focus on monkey studies. The following are actions learned from: deletion of E1 region, a mutant packaging signal flanked by Loxp, mutant packaging sequence, deletion of E3 region (27435430540), replace with Ad5E4orf6, insertion of stuffer DNA flanking copGFP cassette, and introduction of mutation in the knob to make Ad35K++.

[0208] FIG. 119. Mutated packaging signal sequence provided. Residues 1 through 137 are the Ad35 ITR. Text in bold are the Swal sites, the Loxp site is italicized, and the mutated packaging signal is underlined.

[0209] FIGS. 120A, 120B. Schematic drawings of various helper vector and packaging signal variants. In embodiments, the E3 region (27388→30402) is deleted and the CMV-eGFP cassette is located within an E3 deletion, Ad35K++, and eGFP is used instead of copGFP. All four helper vectors containing the packaging signal variants shown in (FIG. 120A) could be rescued. loxP sites were rearranged as amplification could be more efficient. Additional packaging signal variants are exemplified in FIG. 120B.

[0210] FIG. 121. Depiction of a HDAd-combo vector.

[0211] FIG. 122. Experimental protocol.

[0212] FIG. 123. Vectors for editing the GATAA motif within the +58 erythroid bcl11a enhancer region. The vector structure is shown in the upper panel. Both vectors target the GATAA motif. The lower panel shows the base change mediated by the HDAd-C-BE vector. (SEQ ID NOs: 65-68)

[0213] FIGS. 124A-124C. Analysis of vectors on human CD34+ cells. (FIG. 124A) Cell were infected with a MOI of 2000 vp/cell and one day later subjected to erythroid differentiation for 18 days. (FIG. 124B) Cell aliquots were analyzed for target site cleavage by T7E1A assay at different time points. Left bars: HDAd-wtCRISPR, right bars: HDAd-C-BE. (FIG. 124C) Percentage of γ-globin⁺ cells at the end of erythroid differentiation.

[0214] FIG. 125. Engraftment of HDAd-wtCRISPR and HDAd-C-BE transduced CD34+ cells. The MOI of transduction was 2000 vp/cell. Engraftment was measured based on the percentage of human CD45+ cells in peripheral blood mononuclear cells.

[0215] FIG. 126. Base editor HDAd vectors. The sgRNAs target the erythroid bcl11a enhancer (upper panel) or the BCL11a protein binding site in the HBG1/2. The middle panels show the % of base conversion at the day of erythroid differentiation of erythroid progenitor cells line HUDEP-2. The right panels show the level of γ-globin reactivation. (SEQ ID NOs: 67, 65, and 71)

[0216] FIGS. 127A, 127B. (FIG. 127A) Blood smear with typical sickle-like erythrocytes. (FIG. 127B) erythroid parameters.

[0217] FIGS. 128A-128C. (FIG. 128A) In vivo transduction of Townes/CD46 mice without in vivo selection. (FIG. 128B) γ-globin reactivation in RBCs. (FIG. 128C) reticulocyte staining of blood smears before and at week 8 of treatment.

[0218] FIGS. 129A-129D. In vivo HSC transduction in mobilized macaques. Following mobilization with G-CSF, SCF, and AMD3100, two male macaques received HDAd-GFP (1×10¹²vp/kg) by in intravenous injection. Before HDAd injection, animals were pretreated with dexamethasone to block potential cytokine release. (FIG. 129A) Purified peripheral blood CD34+ cells from the indicated time points were cultured and analyzed for GFP expression by flow cytometry. Shown is the average percent of cells expressing GFP over 4 days in culture (FIG. 129B) Representative flow plots of purified CD34+ cells expressing GFP either before (0 hr) or after (6 hr) HDAd-GFP injection. (FIG. 129C) Colony forming assays were initiated with either purified CD34+ cells from peripheral blood or from total PBMC. After 14 days in culture, individual colonies were picked and analyzed for the presence of GFP DNA by PCR. (FIG. 129D) Analysis of GFP expression in bone marrow CD34+ cells. A representative blot is shown. In this study, only HDAd-GFP was injected and therefore only short-term GFP expression was measured.

[0219] FIG. 130. Screening of guide sequences. HUDEP-2 cells were transfected with base editors listed in Table 14. The γ-globin expression was measured at 4 days after transfection (4dpt) and 6 days after in vitro erythroid differentiation (Diff 6d). A CRISPR/Cas9 vector targeting the TGACCA motif in HBG1/2 promoter was used as a positive control (pos ctrl). A CBE targeting CCR5 coding region was included as a negative control (sgNeg). Data shown (mean±SD) are representative of two independent experiments.

[0220] FIGS. 131A, 131B. Comparison of different versions of cytidine base editors. (FIG. 131A) 293 cells (HEK293) were transfected were transfected WTCas9 or BE vectors+pSP-BE4-sgBCL11Ae1 (3+1 μg) bcl11a enhancer target site cleavage was analyzed 4 days after transfection by T7E1 assay. (FIG. 131B) The same study was performed in an erythroleukemia cell lines (K562) WTCas9 or BE vectors+pSP-BE4-sgBCL11Ae1 (2+0.66 μg).

[0221] FIGS. 132A-132C. Design and rescue of HDAd5/35++_BE vectors. (FIG. 132A) Cytidine base editor (CBE) vector design. Rescuable but low yield. (FIG. 132B) 1st version of adenine base editor (ABE) vector design. Not rescuable. (FIG. 132C) ABE codon optimization to reduce repetitiveness. Includes a sequence comparison showing codon optimization of TadA (tRNA adenosine deaminase enzyme) (SEQ ID NOs: 260 and 261)

[0222] FIGS. 133A-133H. Construction and validation of HDAd5/35++BE vectors. (FIG. 133A) HDAd_ABE vector diagram. The 4.2 kb MGMT/GFP cassette flanked by two frt-IRs allows for integrated expression when co-delivered with HDAd_SB vector. The 8.0 kb base editor components were designed outside of the transposon for transient expression. The two TadAN repeats were codon optimized to reduce repetitive sequence (* denotes the catalytic repeat). A microRNA responsive element (miR) was embedded in the 3′ human β-globin UTR to minimize toxicity to producer cells by specifically downregulating ABE expression in 116 cells. PGK, human PGK promoter. bGHpA, bovine growth hormone polyadenylation sequence. SV40 pA, simian virus 40 polyadenylation signal. ITR, inverted terminal repeat. ψ, packaging signal. (FIG. 133B) Information of generated viral vectors. Listed yields are from one 3 L spinner. (FIG. 133C) Validation of viral vectors in HUDEP-2 cells. Cells were transduced with various vectors at indicated MOI (vp/cell). The γ-globin expression was measured at 4 days after transfection (4dpt) and 6 days after in vitro erythroid differentiation (Diff 6d). A CBE vector targeting CCR5 coding region was included as a negative control (sgNeg). Data shown (mean±SD) are representative of two independent experiments. (FIG. 133D) Target base conversion by HDAd_sgHBG #2. HBG1 or HBG2 genomic segments encompassing the targeting bases were amplified and subjected to Sanger sequencing. Data were analyzed by EditR 1.0.9. The arrows indicate targeting bases. The % of conversions were shown below the chromatograms. (FIG. 133E) % of γ-globin expression over α- or β-globin measured by HPLC at day 6 after differentiation. MOI=1000. Data shown (mean±SD) are representative of two independent experiments. FIGS. 133F-133H) A representative clone (#3) derived from HUDEP-2 cells transduced with HDAd_sgHBG #2. Monoallelic-116A→G base conversion was detected in HBG1 promoter (FIG. 133F), resulting in 100% γ-globin⁺ cells by flow cytometry (FIG. 133G). The γ-globin protein level was measured by HPLC (FIG. 133H).

[0223] FIGS. 134A-134C. Data supporting FIG. 133. (FIG. 134A) Supplementary to FIG. 133D. Target base conversion in HUDEP-2 cells treated with indicated viruses. (FIG. 134B) Representative single cell HUDEP-2 clones. Supplementary to FIG. 133F. The B with an arrow indicates biallelic editing and the M and arrow indicates the monoallelic editing. (FIG. 134C) γ-globin expression in corresponding single cell HUDEP-2 clones shown above. Supplementary to FIG. 133G.

[0224] FIGS. 135A-1351. Reactivation of γ-globin in YAC mice after in vivo transduction and selection. (FIG. 135A) Experiment procedure. β-YAC/CD46 mice (n=9) were mobilized by G-CSF/AMD3100 and in vivo transduced with HDAd_sgHBG #2+HDAd_SB. Four rounds of selection by O⁶BG/BCNU were performed at week 4, 6, 8 and 10 weeks after transduction, respectively. The mice were euthanized at week 16. The lineage⁻ cells were isolated and IV injected into lethally irradiated C57BL/6 mice. The secondary transplanted mice were followed for another 16 weeks. (FIG. 135B) GFP marking in PBMCs at various time points after transduction. Each dot represents one animal. (FIG. 135C) Representative dot plots of GFP expression in PBMCs. (FIG. 135D) γ-globin expression in blood cells measured by flow cytometry. (FIG. 135E) Representative dot plots of γ-globin expression in blood cells. (FIG. 135F) γ-globin expression by flow cytometry in Ter-119+ and Ter-119⁻ cells in blood and bone marrow at terminal point in primary mice. (FIG. 135G) γ-globin protein level in red blood cell lysates measured by HPLC. Data shown are percentage over mouse α- or β-globin or human β-globin. (FIG. 135H) γ-globin expression at mRNA level measured by RT-PCR. Data shown are fold of change over mouse HBA or HBB, or human HBB mRNA. (FIG. 135I) Vector copy number (copies per cell) in total bone marrow cells. Primers to MGMT were used.

[0225] FIG. 136. HPLC plot of representative data shown in FIG. 135H.

[0226] FIGS. 137A-137G. Target base conversion. (FIG. 137A) sgHBG #2 guide sequence. The numbering was started from 5′ end. Highlighted with orange background is TGACCA motif, a reported BCL11A binding site. The two adenines (A5 and A8) in the motif was indicated by the two arrows. (FIG. 137B) Percentage of target base conversion. Both A5 and A8 in HBG1 and HBG2 promoter regions were shown. Each dot represents one animal (n=9). (FIG. 137C) Representative chromatograms showing target base conversion in HBG1 and HBG2 regions of mouse #1108. (FIG. 137D) Correlation between average base conversion versus γ-globin expression. The percentage of average base conversion in each animal was the average level at A5 and A8 in HBG1 and HBG2 promoter regions. Each dot represents one animal (n=9). (FIG. 137E) Comparison of base conversion at A5 and A8. Each dot represents one animal (n=9). (FIG. 137F) Chart showing percentage of conversion at targeted adenine nucleotides. (FIG. 137G) Chromatogram showing targeting base conversion in a particular mouse (SEQ ID NO: 250).

[0227] FIGS. 138A-138D. Safety profile. (FIG. 138A) Hematology analysis by HEMAVET® using blood samples at week 16 after transduction. Data shown are mean±SD representing 9 mice transduced with HDAd_sgHBG #2 and 3 untransduced control mice. (FIG. 138B) Percentage of reticulocytes in blood samples at week 16. The samples were stained by Brilliant cresyl blue. Data shown are mean±SD representing 4 mice transduced with HDAd_sgHBG #2 and 3 untransduced control mice. (FIG. 138C) Cellular composition in bone marrow MNCs at the terminal point of primary mice. Untransduced mice was used as control. Each dot represents one animal. (FIG. 138D) Representative reticulocytes staining by Brilliant cresyl blue.

[0228] FIGS. 139A-139C. Secondary transplantation. (FIG. 139A) Engraftment measured by human CD46 expression in PBMCs using flow cytometry. (FIG. 139B) GFP expression in PBMCs. (FIG. 139C) γ-globin expression in peripheral blood cells detected by flow cytometry.

[0229] FIGS. 140A, 140B. Detection of intergenic deletion. (FIG. 140A) The detection of intergenic 4.9 k deletion was described previously (Li et al, Blood, 131(26): 2915, 2018). Genomic DNA isolated from total bone marrow MNCs were used as template. A 9.9 kb genomic region spanning the two CRISPR cutting sites at HBG1 and HBG2 promoters was amplified by PCR. An extra 5.0 kb band in the product indicates the occurrence of the 4.9 k deletion. The percentage of deletion was calculated according to a standard curve formula which was generated by PCR using templates with defined ratios of the 4.9 kb deletion. Samples derived from mice in vivo transduced with a CRISPR vector targeting HBG1/2 promoter were used in comparison. Each lane represents one animal. (FIG. 140B) Summary of the percentage of deletion in FIG. 140A. Each dot represents one animal.

[0230] FIG. 141. Cytotoxicity of BEs vs CRISPR/Cas9. A major concern with current genome-editing technologies using CRISPR/Cas9 is that they introduce double-stranded DNA breaks (DSBs), which may be detrimental to host cells by causing unwanted large fragment deletion and p53-dependent DNA damage responses. Base editors are capable of installing precise nucleotide mutations at targeted genomic loci and present the advantage of avoiding DSBs. This study shows that a critical functional feature of HSC, namely the engraftment in sub-lethally irradiated NSG mice, is not affect by a BE but is dramatically reduced after transduction of human CD34+ cells with CRISPR/Cas9 expressing vector.

[0231] FIG. 142. Expected editing mediated by BE4-sgBCL11AE1. Schematic showing editing of a BCL11A locus. The GATAA motif (SEQ ID NO: 65) and disrupted GATAA motif after base editing (SEQ ID NO: 67) are shown.

[0232] FIG. 143. Optimal location for targets. Schematic of a nucleic acid sequence that highlights exemplary locations for targeting. The figure shows, in part, C to T editing when the target C is in positions 4 through 8 within a protospacer.

[0233] FIG. 144 is a schematic of a vector encoding a base editor.

[0234] FIG. 145. Diagram of viral gDNA. Schematic of a viral gDNA (HBG2-miR, adenine editor) which represents a single contiguous construct but has been divided into two sections solely for ease of presentation.

[0235] FIG. 146. TadA sequences. Schematic representations of sequences of TadA and TadA* (SEQ ID NOs: 265 and 266), including DNA sequences of two TadA+32aa′ (SEQ ID NOs: 367 and 268).

[0236] FIG. 147. Base editing. Schematic representations of wild type (SEQ ID NO: 269) and edited sequences (SEQ ID NO: 269).

[0237] FIG. 148. Base editing. Schematic representation and two gels relating to base editing by an HDAd5/35++_BE4-sgBCL11Ae1-Fl-mgmtGFP (041318-1) virus.

[0238] FIG. 149. Percent of γ-globin⁺ cells. Graph showing the percentage of γ-globin⁺ cells at indicated MOIs.

[0239] FIG. 150. Reactivation of HbF by base editing. Listing of vectors and related information.

[0240] FIG. 151. Listing of vectors and related information, and a graph showing percent HbF+ cells at various MOIs of the base editors.

[0241] FIG. 152. γ-globin expression (HUDEP-2), 2nd trial. Graph showing % HbF+from a second trial in HUDEP-2 cells.

[0242] FIG. 153. γ-globin expression (HUDEP-2), single cell derived clones. Graph showing the % HbF+ in various single cell derived clones.

[0243] FIGS. 154A-154S. Data representing individual single-cell derived clones. Each of FIGS. 154A-154S includes data representative of a single cell clone. (SEQ ID NOs: 271, 250, 252)

[0244] FIG. 155. Test in 293FT cells. Two gels showing results of use of base editors in 293FT cells.

[0245] FIGS. 156A-156D. Sanger sequencing to confirm edited bases (293FT cells). Each of FIGS. 156A-156D includes chromatogram(s) showing sanger sequencing results. (SEQ ID NOs: 269, 275-278)

[0246] FIG. 157. Test in HUDEP-2 cells. Two gels showing results of use of base editors in HUDEP-2 cells 4 days post transfection.

[0247] FIG. 158. γ-globin expression (HUDEP-2). Graph showing expression of γ-globin.

[0248] FIGS. 159A-159D. Sanger sequencing to confirm edited bases (HUDEP-2 cells). Each of FIGS. 159A-159D includes chromatogram(s) showing Sanger sequencing results, where available. (SEQ ID NOs: 269, 275-278)

[0249] FIG. 160. Selected constructs for HDAd virus production (under Maxi preparation). List of constructed vectors indication selection of certain constructs for HDAd virus production (under Maxi preparation).

[0250] FIG. 161. Chart showing engraftment of huCD45+ cells.

[0251] FIG. 162. Transient transfection of HUDEP-2 cells (cleavage by T7E1). Gels showing results of transient transfection of HUDEP-2 cells (cleavage by T7E1).

[0252] FIG. 163. Dual base editing vector application. Schematic representation of a dual base editing vector embodiment (SEQ ID NO: 279).

[0253] FIG. 164. Vector schematic of HDad5/35++combo vector showing human γ-globin/mgmt. gene addition by SB100x transposase and rhesus γ-globin re-activation using CRISPRs targeting the erythroid bcl11a enhancer and the BCL11A binding site in the HBG promoter.

[0254] FIG. 165. Vector schematic showing HDAd-sgAAVS1-rm (no Cas9) vector and HDAd-Comb2. The properties of this vector are 1.8 k homology arm (HA), GFP for tracking transduction in PBMCs, CRISPR cassette outside HA, and targeting HBG promoter.

[0255] FIG. 166. Vector schematic of HDAd-rh-combo with the expression of rh γ-globin using LCR β-globin promoter driven exogenous γ-globin and reactivation of endogenous γ-globin via CRISPR/Cas9-mediated disruption of repressor binding region of γ-globin promoter.

### DETAILED DESCRIPTION

[0256] The current disclosure describes, among other things, recombinant adenoviral vectors, such as Ad5/35 and Ad35 vectors targeting CD46 for in vivo gene editing of hematopoietic stem cells. Ad35 vectors can include knob protein mutations that increase CD46 binding, miRNA control systems that regulate expression of genes, CRISPR components to activate endogenous gene expression, positive selection markers, mini- or long-form β-globin locus control regions (LCR) regulatory sequences, transposase/recombinase systems, and/or various other sequences disclosed herein, including without limitation a number of other beneficial advances that promote conditioning-free in vivo gene therapies.

[0257] Despite the development of many tools for gene therapy, design of vectors and/or therapeutically useful payloads remains an important challenge in the field. Gene therapy payloads can be delivered by viral vectors or non-viral vectors. Exemplary non-viral vectors include cationic lipid, lipid nano emulsion, solid lipid nanoparticle, peptide, and polymer-based delivery systems. Viral vectors can include AAV, herpes simplex, retroviral, lentivirus, alphavirus, flavivirus, rhabdovirus, measles virus, Newcastle disease virus, poxvirus, picornavirus, coxsackievirus vectors, and adenovirus vectors, each with various distinct characteristics. Among adenoviruses, there are also over 50 serotypes. Therapeutic payloads for expression and/or modification of nucleic acid sequences also exist, including without limitation payloads encoding proteins, regulatory nucleic acids, CRISPR/Cas9 systems, base editing systems, transposon systems, and homologous recombination systems. Methods and compositions for gene therapy provided herein address, without limitation, various challenges in the utilization of adenoviral vectors and/or various therapeutic payloads.

[0258] While disclosure in the present specification may be in a particular context (e.g., an adenoviral vector or genome context, e.g., an Ad5, Ad5/35, or Ad35 context), each component is further disclosed independent of any such context and as such may be claimed independently of such context. Exemplary disclosures include sequences and payload constructs of the present disclosure, which those of skill in the art will appreciate can have general relevance not limited to any particular vector, serotype, or other context.

[0259] Aspects of the current disclosure are now described in additional detail as follows: (I) Gene Therapy Vectors; (II) Target Cell Populations; (III) Dosages, Formulations, and Administration; (IV) Applications; (V) Exemplary Embodiments; (VI) Experimental Examples; and (VII) Closing Paragraphs.

### I. GENE THERAPY VECTORS

[0260] Adenovirus (or, interchangeably, “adenoviral”) vectors and genomes refer to those constructs containing adenovirus sequences sufficient to (a) support packaging of an expression construct and to (b) express a coding sequence. Adenoviral genomes can be linear, double-stranded DNA molecules. As those of skill in the art will appreciate, a linear genome such as an adenoviral genome can be present in circular plasmid, e.g., for viral production purposes.

[0261] Natural adenoviral genomes range from 26 kb to 45 kb in length, depending on the serotype.

[0262] Adenoviral vectors include Adenoviral DNA flanked on both ends by inverted terminal repeats (ITRs), which act as a self-primer to promote primase-independent DNA synthesis and to facilitate integration into the host genome. Adenoviral genomes also contain a packaging sequence, which facilities proper viral transcript packaging and is located on the left arm of the genome. Viral transcripts encode several proteins including early transcriptional units, E1, E2, E3, and E4 and late transcriptional units which encode structural components of the Ad virion (Lee et al., Genes Dis., 4(2):43-63, 2017).

[0263] Adenoviral vectors include adenoviral genomes. Recombinant adenoviral vectors are adenoviral vectors that include a recombinant adenoviral genome. A recombinant adenoviral vector includes a genetically engineered form of an adenovirus. Those of skill in the art will appreciate that throughout the present application disclosure of an adenoviral vector includes disclosure of the adenoviral genome thereof, and that disclosure of an adenoviral genome includes disclosure of an adenoviral vector including the disclosed adenoviral genome.

[0264] The adenovirus is a large, icosahedral-shaped, non-enveloped virus. The viral capsid includes three types of proteins including fiber, penton, and hexon based proteins. The hexon makes up the majority of the viral capsid, forming the 20 triangular faces. The penton base is located at the 12 vertices of the capsid and the fiber (also referred to as knobbed fiber) protrudes from each penton base. These proteins, the penton and fiber, are of particular importance in receptor binding and internalization as they facilitate the attachment of the capsid to a host cell (Lee et al., Genes Dis., 4(2):43-63, 2017).

[0265] Ad35 fiber is a fiber protein trimer, each fiber protein including an N-terminal tail domain that interacts with the pentameric penton base, a C-terminal globular knob domain (fiber knob) that functions as the attachment site for the host cell receptors, and a central shaft domain that connects the tail and the knob domains (shaft). The tail domain of the trimeric fiber attaches to the pentameric penton base at the 5-fold axis. In various embodiments, an Ad35 fiber knob includes amino acids 123 to 320 of a canonical wild-type Ad35 fiber protein. In various embodiments, an Ad35 fiber knob includes at least 60 amino acids (e.g., at least 60, 70, 80, 90, 100, 110, 120, 130, 140, 150, 160, 170, 180, 190, or 198 amino acids) having at least 80% (e.g., at least 80%, 85%, 90%, 95%, 96%, 97%, 98%, or 99% sequence identity) sequence identity with a corresponding fragment of amino acids 123 to 320 of a canonical wild-type Ad35 fiber protein. In various embodiments, a fiber knob is engineered for increased affinity with CD46, and/or to confer increased affinity with CD46 to a fiber protein, fiber, or vector, as compared to a reference fiber knob, fiber protein, fiber or vector including a canonical wild-type Ad35 fiber protein, optionally wherein the increase is an increase of at least 1.1-fold, e.g., at least 1, 2, 3, 4, 5, 10, 15, or 20-fold. The central shaft domain consists of 5.5 β-repeats, each containing 15-20 amino acids that code for two anti-parallel β-strands connected by a β-turn. The 3-repeats connect to form an elongated structure of three intertwined spiraling strands that is highly rigid and stable.

[0266] Adenovirus is particularly suitable for use as a gene transfer vector because of its mid-sized genome, ease of manipulation, high titer, wide target-cell range and high infectivity. Both ends of the viral genome contain 100-200 base pair ITRs, which are cis elements necessary for viral DNA replication and packaging. The early (E) and late (L) regions of the genome contain different transcription units that are divided by the onset of viral DNA replication. The E1 region (E1A and E1B) encodes proteins responsible for the regulation of transcription of the viral genome and a few cellular genes. The expression of the E2 region (E2A and E2B) results in the synthesis of the proteins for viral DNA replication. These proteins are involved in DNA replication, late gene expression and host cell shut-off. The products of the late genes, including the majority of the viral capsid proteins, are expressed only after significant processing of a single primary transcript issued by the major late promoter (MLP). The MLP is particularly efficient during the late phase of infection, and all the mRNAs issued from this promoter possess a 5′-tripartite leader (TPL) sequence which makes them preferred mRNAs for translation.

### I(A). Gene Therapy Vector Serotypes

[0267] Among adenoviruses, there are also over 50 serotypes. Adenovirus type 5 is a human adenovirus about which a great deal of biochemical and genetic information is known, and it has historically been used for most constructions employing adenovirus as a vector. Ad5 has been widely used in gene therapy research.

[0268] The majority of humans, however, have neutralizing serum antibodies directed against Ad5 capsid proteins, which can block in vivo transduction with adenoviral vectors that include an Ad5 capsid, such as HDAd5/35 vectors, i.e. vectors that contain Ad5 capsid proteins and chimeric Ad35 fibers. While the existence of neutralizing serum antibodies directed against Ad5 capsid proteins does not negate the therapeutic value of adenoviral vectors that include Ad5 capsids, adenoviral vectors that do not include Ad5 capsids would provide an additional benefit in that the general risk of a clinically significant immunogenic response would be reduced, particularly in subjects that have neutralizing serum antibodies directed against Ad5 capsid proteins.

[0269] Ad35 is one of the rarest of the 57 known human serotypes, with a seroprevalence of <7% and no cross-reactivity with Ad5. Ad35 is less immunogenic than Ad5, which is, in part, due to attenuation of T-cell activation by the Ad35 fiber knob. Further, after intravenous (iv) injection, there is only minimal transduction (only detectable by PCR) of tissues, including the liver, in human CD46 transgenic (hCD46tg) mice and non-human primates. First-generation Ad35 vectors have been used clinically for vaccination purposes.

### I(A)(i). Ad35 Gene Therapy Vectors

[0270] The complete genome of a representative natural Ad35 adenovirus is known and publicly available (see, e.g., Gao et al., 2003 Gene Ther. 10(23): 1941-9; Reddy et al. 2003 Virology 311(2): 384-393; GenBank Accession No. AX049983). While the Ad5 genome is 35,935 bp with a G+C content of 55.2%, the Ad35 genome is 34,794 bp with a G+C content of 48.9%. The genome of Ad35 is flanked by inverted terminal repeats (ITRs). In various embodiments, Ad35 ITRS include 137 bp (e.g., a 5′ Ad35 that includes nucleotides 1-137 or 4-140 of GenBank Accession No. AX049983 and a 3′ ITR that includes nucleotides 34658-34794 of GenBank Accession No. AX049983), which are longer than those of Ad5 (103 bp). In various embodiments, an Ad35 5′ ITR includes at least 80 nucleotides (e.g., at least 80, 90, 100, 110, 120, 130, 140, 150, 160, 170, 180, 190, or 200 nucleotides, e.g., a number of nucleotides having a lower bound of 80, 90, 100, 110, 120, or 130 nucleotides and an upper bound of 130, 140, 150, 160, 170, 180, 190, or 200 nucleotides, e.g., 137 nucleotides) having at least 80% sequence identity (e.g., at least 80%, 85%, 90%, 95%, 96%, 97%, 98%, or 99% A sequence identity) with a corresponding fragment of nucleotides 1-200 of GenBank Accession No. AX049983 and an Ad35 3′ ITR includes at least 80 nucleotides (e.g., at least 80, 90, 100, 110, 120, 130, 140, 150, 160, 170, 180, 190, or 200 nucleotides, e.g., a number of nucleotides having a lower bound of 80, 90, 100, 110, 120, or 130 nucleotides and an upper bound of 130, 140, 150, 160, 170, 180, 190, or 200 nucleotides, e.g., 137 nucleotides) having at least 80% sequence identity (e.g., at least 80%, 85%, 90%, 95%, 96%, 97%, 98%, or 99% sequence identity) with a corresponding fragment of nucleotides 34595-34794 of GenBank Accession No. AX049983. In various embodiments, an ITR is sufficient for one or both of Ad35 encapsidation and/or replication. In various embodiments, an Ad35 ITR sequence for Ad35 vectors differs in that the first 8 bp are CTATCTAT rather than CATCATCA (Wunderlich, J. Gen Viro. 95: 1574-1584, 2014).

[0271] In various embodiments, packaging of the adenovirus genome is mediated by a cis-acting packaging sequence domain located at the 5′ end of the viral genome adjacent to the ITR, and packaging occurs in a polar fashion from left to right. The packaging sequence of Ad35 is located at the left end of the genome with five to seven putative “A” repeats. In various embodiments, the present disclosure includes a recombinant Ad35 donor vector or genome that includes an Ad35 packaging sequence. In various embodiments, the present disclosure includes a recombinant Ad35 helper vector or genome that includes a packaging sequence flanked by recombinase sites. In various embodiments, an Ad35 packaging sequence refers to a nucleic acid sequence including nucleotides 138-481 of GenBank Accession No. AX049983 or a fragment thereof sufficient for or required for packaging of an Ad35 vector or genome (e.g., such that flanking of the sequence with recombinase sites and excision by recombination of the recombinase sites renders the vector or genome deficient for packaging, e.g., by at least 10% as compared to a reference including the packaging sequence, e.g., by at least 10%, 20%, 30%, 40$, 50%, 60%, 70%, 80%, 90%, 91%, 92%, 93%, 94%, 95%, 96%, 97%, 98%, 99%, or 100%, optionally wherein the reference includes the packaging sequence flanked by the recombines sites). In various embodiments, an Ad35 packaging sequence includes at least 80 nucleotides (e.g., at least 80, 90, 100, 110, 120, 130, 140, 150, 160, 170, 180, 190, 200, 225, 250, 275, or 300 nucleotides, e.g., a number of nucleotides having a lower bound of 80, 90, 100, 110, 120, 130, 140, or 150 nucleotides and an upper bound of 150, 160, 170, 180, 190, 200, 225, 250, 275, or 300 nucleotides) having at least 80% sequence identity (e.g., at least 80%, 85%, 90%, 95%, 96%, 97%, 98%, or 99% sequence identity) with a corresponding fragment of nucleotides 137-481 of GenBank Accession No. AX049983.

[0272] In various embodiments, an Ad35 helper vector can include recombinase sites inserted to flank a packaging sequence, where a first recombinase site is inserted immediately adjacent to (e.g., before, or after) a position selected from between nucleotide 130 and nucleotide 400 (e.g., between nucleotides 138 and 180, 138 and 200, 138 and 220, 138 and 240, 138 and 260, 138 and 280, 138 and 300, 138 and 320, 138 and 340, 138 and 360, 138 and 366, 138 and 380, or 138 and 400) and a second recombinase site inserted immediately adjacent to (e.g., after, or before) a position selected from between nucleotide 300 and nucleotide 550 (e.g., between nucleotides 344 and 360, 344 and 380, 344 and 400, 344 and 420, 344 and 440, 344 and 460, 344 and 480, 344 and 481, 344 and 500, 344 and 520, 344 and 540, or 344 and 550). Those of skill in the art will appreciate that the term packaging sequence does not necessarily include all of the packaging elements present in a given vector or genome. For example, a helper genome can include recombinase direct repeats that flank a packaging sequence, where the flanked packaging sequence does not include all of the packaging elements present in the helper genome. Accordingly, in certain embodiments, one or two recombinase direct repeats of a helper genome are positioned within a larger packaging sequence, e.g., such that a larger packaging sequence is rendered noncontiguous by introduction of the one or two recombinase direct repeats. In various embodiments, recombinase direct repeats of a helper genome flank a fragment of the packaging sequence such that excision of the flanked packaging sequence by recombination of the recombinase direct repeats reduces or eliminates (more generally, disrupts) packaging of the helper genome and/or ability of the helper genome to be packaged. By way of example, recombinase direct repeats (DRs) are positioned within 550 nucleotides of the 5′ end of the Ad35 genome in order to functionally disrupt the Ad35 packaging signal but not the 5′ Ad35 ITR. In various embodiments, the DRs are positioned closer than 550 nucleotides from the 5′ end of the Ad35 genome, for instance within 540, 530, 520, 510, 500, 495,490, 480, 470, 450, 440, 400, 380, 360 nucleotides, or closer than within 360 nucleotides of the 5′ end of the Ad35 genome, in order to functionally disrupt the Ad35 packaging signal but not the 5′ Ad35 ITR.

[0273] In various embodiments, the present disclosure includes a recombinant Ad35 donor vector or genome that includes an Ad35 5′ ITR, an Ad35 packaging sequence, and an Ad35 3′ ITR, In certain embodiments, an Ad35 5′ ITR, an Ad35 packaging sequence, and an Ad35 3′ ITR are the only fragments of the recombinant Ad35 donor vector or genome (e.g., the only fragments over 50 or over 100 base pairs) that are derived from, and/or have at least 80% identity to, a canonical Ad35 genome.

[0274] Ad35 early regions include E1A, E1B, E2A, E2B, E3, and E4. Ad35 intermediate regions include pIX and IVa2. The late transcription unit of Ad35 is transcribed from the major late promoter (MLP), located at 16.9 map units. The late mRNAs in Ad35 can be divided into five families of mRNAs (L1-L5), depending on which poly(A) signal is used by these mRNAs. Based on the MLP consensus initiator element, and splice donor and splice acceptor site sequences, the length of tripartite leader (TPL) has been predicted to be 204 nucleotides. The first leader of the TPL, which is adjacent to MLP, is 45 nucleotides in length. The second leader located within the coding region of DNA polymerase is 72 nucleotides in length. The third leader lies within the coding region of precursor terminal protein (pTP) of E2B region and is 87 nucleotides in length. While Ad5 contains two virus-associated (VA) RNA genes, only one virus-associated RNA gene occurs in the genome of Ad35. This VA RNA gene is located between the genes coding for the 52/55K L1 protein and pTP.

[0275] In particular embodiments, an Ad35++ vector is a chimeric vector with a mutant Ad35 fiber knob (e.g., a recombinant Ad35 vector with a mutant Ad35 fiber knob or an Ad5/35 vector with a mutant Ad35 fiber knob). In particular embodiments, an Ad35++ genome is a genome that encodes a mutant Ad35 fiber knob (e.g., a recombinant Ad35 helper genome encoding a mutant Ad35 fiber knob or an Ad5/35 helper genome encoding a mutant Ad35 fiber knob). In various embodiments, an Ad35++ mutant fiber knob is an Ad35 fiber knob mutated to increase the affinity to CD46, e.g., by 25-fold, e.g., such that the Ad35++ mutant fiber knob increases cell transduction efficiency, e.g., at lower multiplicity of infection (MOI) (Li and Lieber, FEBS Letters, 593(24): 3623-3648, 2019).

[0276] In various embodiments, an Ad35++ mutant fiber knob includes at least one mutation selected from Ile192Val, Asp207Gly (or Glu207Gly in certain Ad35 sequences), Asn217Asp, Thr226Ala, Thr245Ala, Thr254Pro, Ile256Leu, Ile256Val, Arg259Cys, and Arg279His. In various embodiments, an Ad35++ mutant fiber knob includes each of the following mutations: Ile192Val, Asp207Gly (or Glu207Gly in certain Ad35 sequences), Asn217Asp, Thr226Ala, Thr245Ala, Thr254Pro, Ile256Leu, Ile256Val, Arg259Cys, and Arg279His. In various embodiments, amino acid numbering of an Ad35 fiber is according to GenBank accession AP_000601 or an amino acid sequence corresponding thereto, e.g., where position 207 is Glu or Asp. In various embodiments, an Ad35 fiber has an amino acid sequence according to GenBank accession AP_000601. Further description of Ad35++fiber knob mutations is found in Wang 2008 J. Virol. 82(21): 10567-10579, which is incorporated herein by reference in its entirety and with respect to fiber knobs.

### I(A)(ii). Ad5/35 Gene Therapy Vectors

[0277] Ad5/35 vectors of the present disclosure include adenoviral vectors that include Ad5 capsid polynucleotides and chimeric fiber polynucleotides including an Ad35 fiber knob, the chimeric fiber polynucleotide typically also including an Ad35 fiber shaft (e.g., Ad5 fiber amino acids 1-44 in combination with Ad35 fiber amino acids 44-323). In various embodiments, the fiber includes an Ad35++ mutant fiber knob. In various Ad5/35 vectors of the present disclosure, all proteins except fiber knob domains and shaft were derived from serotype 5, while fiber knob domains and shafts were derived from serotype 35, and mutations that increased the affinity to CD46 were introduced into the Ad35 fiber knob (see WO 2010/120541 A2). Additionally, in various embodiments, the ITR and packaging sequence of the Ad5/35 vectors are derived from Ad5. (See Table 1 for exemplary knob mutations; and FIG. 95 for a general schematic of HDAd35 vector production.)

TABLE 1
Mutated Ad35 Knob increased binding to CD46

| | Kd (Oleks) | |
|---|---|---|
| A1: Asn217Asp Thr245Pro | A1 4.82 nM | Asp207Gly +++ |
| Ile256Leu* | | |
| A2: Asp207Gly Thr245Ala* | A2 0.629 nM | Thr245Ala ++ |
| A3: Asp207Gly Thr226Ala* | A3 1.407 nM | Ile256Leu + |
| A8: Ile192Val Ile256Val ? | A8 13.6850 nM | |
| B1: Asp207Gly* | B1 1.774 nM | |
| B2: wtAd35(207Asp) | B2 14.98 nM | |
| B3: Asn217Asp* | B3 16.85 nM | |
| B4: Thr245Ala* | B4 7.64 nM | |
| B5: Ile256Leu* | B5 10.96 nM | |
| B6: Ad3 | B6 no binding | |
| B7: Ad11 | B7 11.22 nM | |
| M1: Arg279Cys* | M1 no binding | |
| M3: Arg279His* | M3 no binding | |
| wtAd35* | 13.7 nM | |
| wtAd35* | 15.36 nM | |
| AA: Asp207Gly Thr245Ala | 0.943 nM | |
| Ile256Leu* | | |

*Published in Wang et al. (J. Virol., 82(21): 10567-10579, 2008)
**Published in Wang et al. (J. Virol. 81 (23): 12785-12792, 2007)

### I(B). Helper-Dependent Ad35 and Ad5/35 Vectors

[0278] In general, the path from a natural adenoviral vector to a helper-dependent adenoviral vector can include three generations. First-generation adenoviral vectors are engineered to remove genes E1 and E3. Without these genes, adenoviral vectors cannot replicate on their own but can be produced in E1-expressing mammalian cell lines such as HEK293 cells. With only first-generation modifications, adenoviral vector cloning capacity is limited, and host immune response against the vector can be problematic for effective payload expression. Second-generation adenoviral vectors, in addition to E1/E3 removal, are engineered to remove non-structural genes E2 and E4, resulting in increased capacity and reduced immunogenicity. Third-generation adenoviral vector (also referred to as gutless, high capacity adenoviral vector, or helper-dependent adenoviral vector (HdAd)) are further engineered to remove all viral coding sequences, and retain only the ITRs of the genome and packaging sequence of the genome or a functional fragment thereof. Because these genomes do not encode the proteins necessary for viral production, they are helper-dependent: a helper-dependent genome can only be packaged into vector if they are present in a cell that includes a nucleic acid sequence that provides viral proteins in trans. These helper-dependent vectors are also characterized by still greater capacity and further decreased immunogenicity. Because the sequences of each viral genome are distinct at least for each serotype, the proper modifications required to produce a helper-dependent viral genome, and/or a helper genome, for a given serotype cannot be predicted from available information relating to other serotypes.

[0279] Helper-dependent adenoviral vectors (HDAd) engineered to lack all viral coding sequences can efficiently transduce a wide variety of cell types, and can mediate long-term transgene expression with negligible chronic toxicity. By deleting the viral coding sequences and leaving only the cis-acting elements necessary for genome replication (ITRs) and encapsidation (γ), cellular immune response against the Ad vector is reduced. HDAd vectors have a large cloning capacity of up to 37 kb, allowing for the delivery of large payloads. These payloads can include large therapeutic genes or even multiple transgenes and large regulatory components to enhance, prolong, and regulate transgene expression. Like other adenoviral vectors, typical HDAd genome generally remain episomal and do not integrate with a host genome (Rosewell et al., J Genet Syndr Gene Ther. Suppl 5:001, 2011, doi: 10.4172/2157-7412.s5-001).

[0280] In some HDAd vector systems, one viral genome (a helper genome) encodes all of the proteins required for replication but has a conditional defect in the packaging sequence, making it less likely to be packaged into a virion. As noted above, this can require identification of the packaging sequence or a functionally contributing (e.g., functionally required) fragment thereof and modification of the subject genome in a manner that does not negate propagation of the helper vector, which cannot be ascertained from existing knowledge relating to other adenoviral serotypes, A separate donor viral genome includes (e.g., only includes) viral ITRs, a payload (e.g., a therapeutic payload), and a functional packaging sequence (e.g., normal wild-type packaging sequence, or a functional fragment thereof), which allows this donor viral genome to be selectively packaged into HDAd viral vectors and isolated from the producer cells. HDAd donor vectors can be further purified from helper vectors by physical means. In general, some contamination of helper vectors and/or helper genomes in HDAd viral vectors and HDAd viral vector formulations can occur and can be tolerated.

[0281] In some HDAd vector systems, a helper genome utilizes a Cre/loxP system. In certain such HDAd vector systems, the HDAd donor genome includes 500 bp of noncoding adenoviral DNA that includes the adenoviral ITRs which are required for genome replication, and ψ which is the packaging sequence or a functional fragment thereof required for encapsidation of the genome into the capsid. It has also been observed that the HDAd donor vector genome can be most efficiently packaged when it has a total length of 27.7 kb to 37 kb, which length can be composed, e.g., of a therapeutic payload and/or a “stuffer” sequence. The HDAd donor genome can be delivered to cells, such as 293 cells (HEK293) that expresses Cre recombinase, optionally where the HDAd donor genome is delivered to the cells in a non-viral vector form, such as a bacterial plasmid form (e.g., where the HDAd donor genome is constructed as a bacterial plasmid (pHDAd) and is liberated by restriction enzyme digestion). The same cells can be transduced with the helper genome, which can include an E1-deleted Ad vector bearing a packaging sequence or functionally contributing (e.g., functionally required) fragment thereof flanked by loxP sites so that following infection of 293 cells expressing Cre recombinase, the packaging sequence or functionally contributing (e.g., functionally required) fragment thereof is excised from the helper genome by Cre-mediated site-specific recombination between the loxP sites. Thus, the HDAd donor genome can be transfected into 293 cells (HEK293) that express Cre and are transduced with a helper genome bearing a packaging sequence (γ) or a functional fragment thereof flanked by recombinase sites (e.g., loxP sites) such that excision mediated by a corresponding recombinase (e.g., Cre-mediated excision) of ψ renders the helper virus genome unpackageable, but still able to provide all of the necessary trans-acting factors for propagation of the HDAd. After excision of the packaging sequence or functionally contributing (e.g., functionally required) fragment thereof, a helper genome is unpackageable but still able to undergo DNA replication and thus trans-complement the replication and encapsidation of the HDAd donor genome. In some embodiments, to prevent generation of replication competent Ad (RCA; E1⁺) as a consequence of homologous recombination between the helper and HDAd donor genomes present in 293 cells (HEK293) a “stuffer” sequence can be inserted into the E3 region to render any E1⁺ recombinants too large to be packaged. Similar HDAd production systems have been developed using FLP (e.g., FLPe)/frt site-specific recombination, where FLP-mediated recombination between frt sites flanking the packaging sequence of the helper genome selects against encapsidation of helper genomes in 293 cells (HEK293) that express FLP. Alternative strategies to select against the helper vectors have been developed. An Ad35 helper virus typically includes all of the viral genes except for those in E1, as E1 expression products can be supplied by complementary expression from the genome of a producer cell line.

[0282] HDAd5/35 donor vectors, donor genomes, helper vectors and helper genomes are exemplary of compositions provided herein and used in various methods of the present disclosure. An HDAd5/35 vector or genome is a helper-dependent chimeric Ad5/35 vector or genome with an Ad35 fiber knob and an Ad5 shaft. An HDAd5/35++ vector or genome is a helper-dependent chimeric Ad5/35 vector or genome with a mutant Ad35 fiber knob. The vector is mutated to increase the affinity to CD46, e.g., by 25-fold and increases cell transduction efficiency at lower multiplicity of infection (MOI) (Li & Lieber, FEBS Letters, 593(24): 3623-3648, 2019). An Ad5/35 helper vector is a vector that includes a helper genome that includes a conditionally expressed (e.g., frt-site or loxP-site flanked) packaging sequence and encodes all of the necessary trans-acting factors for production of Ad5/35 virions into which the donor genome can be packaged.

[0283] HDAd35 donor vectors, donor genomes, helper vectors and helper genomes are also exemplary of compositions provided herein and used in various methods of the present disclosure. An HDAd35 vector or genome is a helper-dependent Ad35 vector or genome. An HDAd35++ vector or genome is a helper-dependent Ad35 vector or genome with a mutant Ad35 fiber knob which enhances its affinity to CD46 and increases cell transduction efficiency. An Ad35 helper vector is a vector that includes a helper genome that includes a conditionally expressed (e.g., frt-site or loxP-site flanked) packaging sequence and encodes all of the necessary trans-acting factors for production of Ad35 virions into which the donor genome can be packaged. The present disclosure further includes an HDAd35 donor vector production system including a cell including an HDAd35 donor genome and an Ad35 helper genome. In certain such cells, viral proteins encoded and expressed by the helper genome can be utilized in production of HDAd35 donor vectors in which the HDAd35 donor genome is packaged. Accordingly, the present disclosure includes methods of production of HDAd35 donor vectors by culturing cells that include an HDAd35 donor genome and an Ad35 helper genome. In some embodiments the cells encode and express a recombinase that corresponds to recombinase direct repeats that flank a packaging sequence of the Ad35 helper vector. In some embodiments, the flanked packaging sequence of the Ad35 helper genome has been excised.

[0284] In some embodiments the Ad35 helper genome encodes all Ad35 coding sequences. In some embodiments the Ad35 helper genome encodes and/or expresses all Ad35 coding sequences except for one or more coding sequences of the E1 region and/or an E3 coding sequence and/or an E4 coding sequence. In various embodiments, a helper genome that does not encode and/or express an Ad35 E1 gene does not encode and/or express an Ad35 E4 gene, optionally wherein the Ad35 helper genome is further engineered to include an Ad5 E4orf6 coding sequence. In various embodiments, as will be appreciate by those of skill in the art, cells of compositions and methods for production of HDAd 35 donor vectors can be cells that express an Ad5 E1 expression product. In various embodiments, as will be appreciate by those of skill in the art, cells of compositions and methods for production of HDAd 35 donor vectors can be 293 T cells (HEK293).

[0285] A helper may be engineered from wild-type or similarly propagation-competent vectors, such as a wild-type or propagation-competent Ad5 vector or Ad35 vector. As those of skill in the art will appreciate, one strategy that can be used in engineering of a helper vector is deletion or other functional disruption of E1 gene expression. The E1 region, located in the 5′ portion of adenoviral genomes, encodes proteins required for wild-type expression of the early and late genes. E1 deletion reduces or eliminates expression of certain viral genes controlled by E1, and E1-deleted helper viruses are replication-defective. Accordingly, E1-deficient helper virus can be propagated using cell lines that express E1. For example, where an E1-deficient Ad35 helper vector is engineered to encode an Ad5 E4orf6, the helper vector can be propagated in a cell line that expresses Ad5 E1, and where an E1-deficient Ad35 helper vector encodes an Ad5 E4orf6, the helper vector can be propagated in a cell line that expresses Ad5 E1. In one exemplary cell type for HDAd35 vector production, HEK293 cells express Ad5 E1 b55k, which is known to form a complex with Ad5 E4 protein ORF6. Table 2 provides an example summary of expression products encoded by an Ad35 genome (see Gao, Gene Ther. 10:1941-1949, 2003).

TABLE 2
Predicated translational features of the Ad35 genome.

| | | |
|---|---|---|
| Features | From | To |

E1 and pIX regions

| | | | |
|---|---|---|---|
| E1A 261R | | 569 | 1148 |
| | Join | 1233 | 1441 |
| E1A 230R | | 569 | 1055 |
| | Join | 1233 | 1441 |
| E1A 58R | | 569 | 640 |
| | Join | 1233 | 1337 |
| E1B 214R (small T antigen) | | 1611 | 2153 |
| E1B 494R (large T antigen) | | 1916 | 3400 |
| pIX | | 3484 | 3903 |
| ORF-1 | | 2366 | 2689 |

E2 and IVa2 regions (complementary strand)

| | | | |
|---|---|---|---|
| IVa2 | | 5579 | 5590 |
| | Join | 3966 | 5300 |
| E2B DNA pol | | 5069 | 8437 |
| E2B pTP | | 8440 | 10356 |
| E2A DBF | | 22414 | 23415 |
| ORF-2 | | 5988 | 6482 |
| ORF-3 | | 7847 | 8257 |
| ORF-4 | | 15663 | 15971 |
| ORF-5 | | 15743 | 16216 |
| ORF-6 | | 16457 | 17041 |
| ORF-7 | | 17543 | 17938 |
| ORR-8 | | 17994 | 18713 |
| ORF-9 | | 21858 | 22436 |
| ORF-10 | | 22128 | 22502 |
| ORF-11 | | 23027 | 23488 |

E3 region

| | | |
|---|---|---|
| E3 12.2K protein | 27198 | 27515 |
| E3 15.0K protein | 27469 | 27864 |
| E3 18.5K protein | 27849 | 28349 |
| E3 20.3K protein | 28369 | 28914 |
| E3 20.6K protein | 28932 | 29495 |
| E3 15.2K protein | 29817 | 30221 |
| E3 15.3K protein | 30214 | 30621 |
| ORF-12 | 25693 | 26019 |
| ORF-13 | 27908 | 28240 |

E4 region (complementary strand)

| | | |
|---|---|---|
| E4 299R | 32075 | 32974 |
| E4 145R | 33604 | 34041 |
| E4 125R | 34038 | 34415 |
| E4 117R | 33254 | 33607 |
| E4 122R | 32877 | 33245 |
| ORF-14 | 33100 | 33609 |
| VA RNA region | 10433 | 10594 |

L region

| | | | |
|---|---|---|---|
| L1 52, 55K | | 10653 | 11819 |
| L1 IIIa | | 11845 | 13608 |
| L2 III (penton base) | | 13690 | 15375 |
| L2 pVII | | 15383 | 15961 |
| L2 V | | 16004 | 17059 |
| L3 pVI | | 17399 | 18139 |
| L3 II (hexon) | | 18255 | 21113 |
| L3 23K (protease) | | 21150 | 21779 |
| L4 100K | | 23446 | 25884 |
| L4 22K | | 25616 | 26191 |
| L4 33K | | 25616 | 25934 |
| | Join | 26104 | 26465 |
| L4 pVIII | | 26515 | 27198 |
| L5 IV(fiber) | | 30826 | 31797 |

[0286] The present disclosure includes, among other things, HDAd35 donor vectors and genomes that include Ad35 ITRs (e.g., a 5′ Ad35 ITR and a 3′ ITR), e.g., where two Ad35 ITRs flank a payload. The present disclosure includes, among other things, HDAd35 donor vectors and genomes that include an Ad35 packaging sequence or a functional fragment thereof. The present disclosure includes, among other things, HDAd35 donor vectors and genomes in which E1 or a fragment thereof is deleted (e.g., where the E1 deletion includes deletion of nucleotides 481-3112 of GenBank Accession No. AX049983 or corresponding positions of another Ad35 vector sequence provided herein). The present disclosure includes, among other things, HDAd35 vectors and genomes in which E3 or a fragment thereof is deleted (e.g., where the E3 deletion includes deletion of nucleotides 27609 to 30402 or 27435-30542 of GenBank Accession No. AX049983 or corresponding positions of another Ad35 vector sequence provided herein).

[0287] The present disclosure includes, among other things, Ad35 helper vectors and genomes that include two recombination site elements that flank a packaging sequence or functionally contributing (e.g., functionally required) fragment thereof, each recombination site element including a recombination site, where the two recombination sites are sites for the same recombinase. Construction of an Ad35 helper vector, as noted above, cannot be predictably engineered from existing knowledge relating to other vectors. To the contrary, relevant sequences of Ad35 are very different from, e.g., corresponding sequences of Ad5 (compare, e.g., the 5′ 600 to 620 nucleotides of Ad35 and Ad5). Moreover, packaging sequence are serotype-specific. The Ad35 packaging sequence includes sequences that correspond to at least Ad5 packaging single sequences AI, AII, AIII, AIV, and AV. Accordingly, production of an Ad35 helper vector requires several unpredictable determinations, including (1) identification of the Ad35 packaging sequence or functionally contributing (e.g., functionally required) fragment thereof to be flanked by recombinase sites (e.g., loxP sites) by insertion of recombinase site elements into the subject genome, which is not straightforward where sequence similarity is limited; (2) identification of recombinase site element insertions that do not negate propagation of the helper vector (under conditions where the packaging sequence or functionally contributing (e.g., functionally required) fragment thereof is not excised), which cannot be predicted; and/or (3) identification of spacing between the recombination site elements that permits efficient deletion of the packaging sequence or functionally contributing (e.g., functionally required) fragment thereof while reducing helper virus packaging during production of HDAd35 donor vectors (e.g., in a cre recombinase-expressing cell line such as the 116 cell line).

[0288] The present disclosure includes a plurality of exemplary Ad35 helper vectors and genomes that (1) include loxP sites flanking a functionally contributing or functionally required fragment of the Ad35 packaging sequence, at least in that recombination of the loxP sites causing excision of the flanked sequence reduces propagation of the vector by, e.g., at least 20%, 30%, 40%, 50%, 60%, 70%, 80%, 90%, 91%, 92%, 93%, 94%, 95%, 96%, 97%, 98%, 99%, or 100% (e.g., reduces propagation of the vector by a percentage having a lower bound of 20%, 30%, 40%, 50%, 60%, 70%, and an upper bound of 60%, 70%, 80%, 90%, 91%, 92%, 93%, 94%, 95%, 96%, 97%, 98%, 99%, or 100%), optionally where percent propagation is measured as the number of viral particles produced by propagation of excised vector (recombinase site-flanked sequence excised) as compared to complete vector (recombinase site-flanked sequence not excised) or wild-type Ad35 vector under comparable conditions.

[0289] In at least one exemplary Ad35 helper vector, a recombinase site element (e.g., a loxP element) is inserted after nucleotide 178 and a recombinase site element (e.g., a loxP element) is inserted after nucleotide 437. Excision of the loxP-flanked sequence removes packaging sequence sequences AI to AIV. In certain such embodiments, deletion of nucleotides 345-3113 removes the E1 gene as well as packaging single sequences AVI and AVII. Accordingly, the flanked packaging sequence or fragment thereof corresponds to positions 179-344. Vectors according to this description were shown to propagate.

[0290] In at least one exemplary Ad35 helper vector, a recombinase site element (e.g., a loxP element) is inserted after nucleotide 178 and a recombinase site element (e.g., a loxP element) is inserted after nucleotide 481, where nucleotides 179-365 are deleted (removing packaging sequence sequences AI to AV, such that remaining sequences AVI and AVII are in the nucleic acid sequence flanked by the recombinase site elements. In certain such embodiments, deletion of nucleotides 482-3113 removes the E1 gene. Accordingly, the flanked packaging sequence or fragment thereof corresponds to positions 366-481. Vectors according to this description were shown to propagate.

[0291] In at least one exemplary Ad35 helper vector, a recombinase site element (e.g., a loxP element) is inserted after nucleotide 154 and a recombinase site element (e.g., a loxP element) is inserted after nucleotide 481, In certain such embodiments, deletion of nucleotides 482-3113 removes the E1 gene. Accordingly, the flanked packaging sequence or fragment thereof corresponds to positions 155-481. Vectors according to this description were shown to propagate.

[0292] In at least one exemplary Ad35 helper vector, a recombinase site element (e.g., a loxP element) is inserted after nucleotide 158 and a recombinase site element (e.g., a loxP element) is inserted after nucleotide 480. Vectors according to this description were shown to propagate. In certain such embodiments, nucleotides 27388-30402 including E3 region are deleted. In certain embodiments, the vector is an Ad35++ vector.

[0293] In at least one exemplary Ad35 helper vector, a recombinase site element (e.g., a loxP element) is inserted after nucleotide 158 and a recombinase site element (e.g., a loxP element) is inserted after nucleotide 446. Vectors according to this description were shown to propagate. In certain such embodiments, nucleotides 27388-30402 including E3 region are deleted. In certain embodiments, the vector is an Ad35++ vector.

[0294] In at least one exemplary Ad35 helper vector, a recombinase site element (e.g., a loxP element) is inserted after nucleotide 179 and a recombinase site element (e.g., a loxP element) is inserted after nucleotide 480. Vectors according to this description were shown to propagate. In certain such embodiments, nucleotides 27388-30402 including E3 region are deleted. In certain embodiments, the vector is an Ad35++ vector.

[0295] In at least one exemplary Ad35 helper vector, a recombinase site element (e.g., a loxP element) is inserted after nucleotide 206 and a recombinase site element (e.g., a loxP element) is inserted after nucleotide 480. Vectors according to this description were shown to propagate. In certain such embodiments, nucleotides 27,388-30,402 including E3 region are deleted. In certain embodiments, nucleotides 27,607-30,409 or 27,609-30,402 are deleted. In certain embodiments, nucleotides 27,240-27,608 are not deleted.

[0296] In at least one exemplary Ad35 helper vector, a recombinase site element (e.g., a loxP element) is inserted after nucleotide 139 and a recombinase site element (e.g., a loxP element) is inserted after nucleotide 446. In certain such embodiments, nucleotides 27609-30402 are deleted.

[0297] In at least one exemplary Ad35 helper vector, a recombinase site element (e.g., a loxP element) is inserted after nucleotide 158 and a recombinase site element (e.g., a loxP element) is inserted after nucleotide 446. In certain such embodiments, nucleotides 27609-30402 are deleted.

[0298] In at least one exemplary Ad35 helper vector, a recombinase site element (e.g., a loxP element) is inserted after nucleotide 179 and a recombinase site element (e.g., a loxP element) is inserted after nucleotide 446. In certain such embodiments, nucleotides 27609-30402 are deleted.

[0299] In at least one exemplary Ad35 helper vector, a recombinase site element (e.g., a loxP element) is inserted after nucleotide 201 and a recombinase site element (e.g., a loxP element) is inserted after nucleotide 446. In certain such embodiments, nucleotides 27609-30402 are deleted.

[0300] In at least one exemplary Ad35 helper vector, a recombinase site element (e.g., a loxP element) is inserted after nucleotide 158 and a recombinase site element (e.g., a loxP element) is inserted after nucleotide 481. In certain such embodiments, nucleotides 27609-30402 are deleted.

[0301] In at least one exemplary Ad35 helper vector, a recombinase site element (e.g., a loxP element) is inserted after nucleotide 179 and a recombinase site element (e.g., a loxP element) is inserted after nucleotide 384. In certain such embodiments, nucleotides 27609-30402 are deleted.

[0302] In at least one exemplary Ad35 helper vector, a recombinase site element (e.g., a loxP element) is inserted after nucleotide 179 and a recombinase site element (e.g., a loxP element) is inserted after nucleotide 481. In certain such embodiments, nucleotides 27609-30402 are deleted.

[0303] In at least one exemplary Ad35 helper vector, a recombinase site element (e.g., a loxP element) is inserted after nucleotide 206 and a recombinase site element (e.g., a loxP element) is inserted after nucleotide 481. In certain such embodiments, nucleotides 27609-30402 are deleted.

[0304] An additional optional engineering consideration can be engineering of a helper genome having a size that permits separation of helper vector from HDAd35 donor vector by centrifugation, e.g., by CsCl ultracentrifugation. One means of achieving this result is to increase the size of the helper genome as compared to a typical Ad35 genome, which has a wild-type length of 34,794 bp. In particular, adenoviral genomes can be increased by engineering to at least 104% of wild-type length. Certain helper vectors of the present disclosure include the Ad35 E1 region and E4 region, delete the E3 region, and can accommodate a payload and/or stuffer sequence.

[0305] Ad35 helper vectors can be used for production of Ad35 donor vectors. Production of HDAd35++ vectors can include co-transfection of a plasmid containing the HDAd vector genome and a packaging-defective helper virus that provides structural and non-structural viral proteins. The helper virus genome can rescue propagation of the Ad35 donor vector and Ad35 donor vector can be produced, e.g., at a large scale, and isolated. Various protocols are known in the art, e.g., at Palmer et al., 2009 Gene Therapy Protocols. Methods in Molecular Biology, Volume 433. Humana Press; Totowa, N.J.: 2009. pp. 33-53.

[0306] The present disclosure includes exemplary data demonstrating that HDAd35 donor vectors of the present disclosure perform comparably to HDAd5/35 donor vectors in transduction of human CD34+ cells, as measured by percent of contacted cells expressing a payload coding sequence encoding GFP. Results were confirmed at multiple MOIs ranging from 500 to 2000 vector particles per contacted cell. Exemplary experiments were conducted using HDAd35 donor vectors used in generating exemplary data were produced using an Ad35 helper vector as disclosed above, where loxP sites flanked nucleotides 366-481 (see, e.g., FIG. 117).

[0307] Various exemplary donor vectors are provided herein. The present disclosure provides, as non-limiting examples, HDAd35 donor genomes as set forth in Tables 3-6.

TABLE 3
Exemplary HDAd35 donor vector according to SEQ ID NO: 304.

| | Position in |
|---|---|
| Sequence Feature | SEQ ID NO: 304 |
| Ad35 5′ (including ITR, Packaging Sequence) | Start: 1 End: 481 |
| FRT recombinase direct repeat | Start: 14126 End: 14159 |
| | (Complementary) |
| pT4 transposase inverted repeat | Start: 14220 End: 14463 |
| EF1α promoter | Start: 14491 End: 15825 |
| mgmt^{P140K} selection cassette | Start: 15843 End: 16466 |
| polyA sequence | Start: 16484 End: 16705 |
| pT4 transposase inverted repeat | Start: 16735 End: 17000 |
| FRT recombinase direct repeat | Start: 17107 End: 17140 |
| | (Complementary) |
| Ad35 3′ (including ITR) | Start: 28823 End: 29230 |

TABLE 4
Exemplary HDAd35 donor vector according to SEQ ID NO: 305

| | Position in SEQ |
|---|---|
| Sequence Feature | ID NO: 305 |
| Ad35 5′ (including ITR, Packaging Sequence) | Start: 1 End: 481 |
| FRT recombinase direct repeat | Start: 14126 End: 14159 |
| | (Complementary) |
| pT4 transposase inverted repeat | Start: 14220 End: 14463 |
| EF1α promoter | Start: 14478 End: 15812 |
| mgmt^{P140K} selection cassette | Start: 15830 End: 16450 |
| 2A peptide-encoding sequence | Start: 16451 End: 16522 |
| GFP-encoding sequence | Start: 16523 End: 17242 |
| SV40 polyA sequence | Start: 17269 End: 17390 |
| pT4 transposase inverted repeat | Start: 17501 End: 17766 |
| FRT recombinase direct repeat | Start: 17873 End: 17906 |
| | (Complementary) |
| Ad35 3′ (including ITR) | Start: 29589 End: 29996 |

TABLE 5
Exemplary HDAd35 donor vector according to SEQ ID NO: 288.

| | Position in |
|---|---|
| Sequence Feature | SEQ ID NO: 288 |
| Ad35 5′ (including ITR, Packaging Sequence) | Start: 1 End: 481 |
| FRT recombinase direct repeat | Start: 14126 End: 14159 |
| | (Complementary) |
| pT4 transposase inverted repeat | Start: 14220 End: 14463 |
| EF1α promoter | Start: 14478 End: 15812 |
| mgmt^{P140K} selection cassette | Start: 15830 End: 16450 |
| 2A peptide-encoding sequence | Start: 16451 End: 16522 |
| mCherry-encoding sequence | Start: 16526 End: 17230 |
| SV40 polyA sequence | Start: 17259 End: 17380 |
| pT4 transposase inverted repeat | Start: 17491 End: 17756 |
| FRT recombinase direct repeat | Start: 17863 End: 17896 |
| | (Complementary) |
| Ad35 3′ (including ITR) | Start: 29579 End: 29986 |

TABLE 6
Exemplary support vector according to SEQ ID NO: 289.

| | Position in |
|---|---|
| Sequence Feature | SEQ ID NO: 289 |
| Ad35 5′ (including ITR, Packaging Sequence) | Start: 1 End: 481 |
| PGK promoter | Start: 14103 End: 14614 |
| SB100x transposase-encoding sequence | Start: 14763 End: 15785 |
| BGH polyA sequence | Start: 15811 End: 16128 |
| B-globin polyA sequence | Start: 16088 End: 16376 |
| | (Complementary) |
| Flpe recombinase-encoding sequence | Start: 16488 End: 17759 |
| | (Complementary) |
| EF1α promoter | Start: 17780 End: 18895 |
| | (Complementary) |
| Ad35 3′ (including ITR) | Start: 29751 End: 30158 |

TABLE 7
Exemplary Ad35 helper vector according to SEQ ID NO: 286

| | Position in |
|---|---|
| Sequence Feature | SEQ ID NO: 286 |
| Ad35 5′ (including ITR)(Ad35 nt 1-178) | Start: 2582 End: 2759 |
| LoxP recombinase site | Start: 2768 End: 2801 |
| Ad35 packaging sequence (Ad35 nt 179-344) | Start: 2808 End: 2973 |
| LoxP recombinase site | Start: 2974 End: 3007 |
| Ad35 sequence (Ad35 nt 3112-27435) | Start: 3016 End: 27338 |
| Lambda-1 sequence | Start: 27393 End: 29862 |
| | (Complementary) |
| BGH polyA sequence | Start: 30176 End: 30390 |
| CopGFP-encoding sequence | Start: 30415 End: 31080 |
| | (Complementary) |
| CMV promoter | Start: 31127 End: 31779 |
| | (Complementary) |
| Lambda-2 sequence | Start: 31831 End: 33360 |
| Ad35 sequence (Ad35 nt 30544-31879) | Start: 33421 End: 34756 |
| Ad5 E4orf6 sequence | Start: 34752 End: 35866 |
| Ad35 3′ (including ITR) | Start: 35864 End: 37686 |
| (Ad35 nt 32972-34794) | |

TABLE 8
Exemplary Ad35 helper vector according to SEQ ID NO: 51.

| | Position in |
|---|---|
| Sequence Feature | SEQ ID NO: 51 |
| Ad35 5′ (including ITR) (Ad35 nt 1-178) | Start: 2582 End: 2759 |
| LoxP recombinase site | Start: 2768 End: 2801 |
| Ad35 packaging sequence (Ad35 nt 366-481) | Start: 2808 End: 2923 |
| LoxP recombinase site | Start: 2924 End: 2957 |
| Ad35 sequence (Ad35 nt 3112-2743) | Start: 2966 End: 27288 |
| Lambda-1 sequence | Start: 27343 End: 29812 |
| | (Complementary) |
| BGH polyA sequence | Start: 30126 End: 30340 |
| CopGFP-encoding sequence | Start: 30365 End: 31030 |
| | (Complementary) |
| CMV promoter | Start: 31077 End: 31729 |
| | (Complementary) |
| Lambda-2 sequence | Start: 31781 End: 33310 |
| Ad35 sequence (Ad35 nt 30544-31879) | Start: 33371 End: 34706 |
| Ad5 E4orf6 sequence | Start: 34702 End: 35816 |
| Ad35 3′ (including ITR) | Start: 35814 End: 37636 |
| (Ad35 nt 32972-34794) | |

TABLE 9
Exemplary Ad35 helper vector according to SEQ ID NO: 52.

| | Position in |
|---|---|
| Sequence Feature | SEQ ID NO: 52 |
| Ad35 5′ (including ITR) (Ad35 nt 1-154) | Start: 2582 End: 2735 |
| LoxP recombinase site | Start: 2744 End: 2777 |
| Ad35 packaging sequence (Ad35 nt 155-481) | Start: 2784 End: 3110 |
| LoxP recombinase site | Start: 3111 End: 3144 |
| Ad35 sequence (Ad35 nt 3112-27435) | Start: 3153 End: 27475 |
| Lambda-1 sequence | Start: 27530 End: 29999 |
| | (Complementary) |
| BGH polyA sequence | Start: 30313 End: 30527 |
| CopGFP-encoding sequence | Start: 30552 End: 31217 |
| | (Complementary) |
| CMV promoter | Start: 31264 End: 31916 |
| | (Complementary) |
| Lambda-2 sequence | Start: 31968 End: 33497 |
| Ad35 sequence (Ad35 nt 30544-31879) | Start: 33558 End: 34893 |
| Ad5 E4orf6 sequence | Start: 34889 End: 36003 |
| Ad35 3′ (including ITR) | Start: 36001 End: 37823 |
| (Ad35 nt 32972-34794) | |

### I(C). Gene Therapy Vector Payloads

[0308] Ad35 and Ad5/35 donor vectors and genomes of the present disclosure can include a variety of nucleic acid payloads that can include any of one or more coding sequences that encode one or more expression products, one or more regulatory sequences operably linked to a coding sequence, one or more stuffer sequences, and the like. In various embodiments, the payload is engineered in order to achieve a desired result such as a therapeutic effect in a host cell or system, e.g., expression of a protein of therapeutic interest or of expression of a gene editing system, e.g., a CRISPR/Cas system or base editing system, to generate a sequence modification of therapeutic interest. In some embodiments, a payload can include a gene. A gene can include not only coding sequences but also regulatory regions such as promoters, enhancers, termination regions, locus control regions (LCRs), termination and polyadenylation signal elements, splicing signal elements, and the like. The term further can include all introns and other DNA sequences spliced from the mRNA transcript, along with variants resulting from alternative splice sites. The sequences can also include degenerate codons of a reference sequence or sequences that may be introduced to provide codon preference in a specific organism or cell type.

[0309] A payload can include a single gene or multiple genes. A payload can include a single regulatory sequence or a plurality of regulatory sequences. A payload can include a single coding sequence or a plurality of coding sequences. A payload can include a plurality of coding sequences where the individual expression products of the coding sequences function together, e.g., as in the case of an endonuclease and a guide RNA, or independently, e.g., as two separate proteins that do not directly or indirectly bind. In some instances, a plurality of coding sequences can function cooperatively, e.g., where an endonuclease and guide RNA cause an increase expression of coding sequence endogenous to a host cell or system and the payload further encoded and expresses a protein having at least one biological activity corresponding to that of a protein encoded by the endogenous coding sequence. As will be appreciated by those of skill in the art, any payload-encoded expression products provided herein that are not encoded by the canonical wild-type Ad35 genome can be referred to herein as a heterologous expression product.

### I(C)(i). Payload Expression Products

[0310] A payload of an adenoviral donor vector or adenoviral donor genome of the present disclosure can include one or more coding sequences that encode any of a variety of expression products. Exemplary expression products include proteins, including without limitation replacement therapy proteins for treatment of diseases or conditions characterized by low expression or activity of a biologically active protein as compared to a reference level. Exemplary expression products include CRISPR/Cas and base editor systems. Exemplary expression products include antibodies, CARs, and TCRs. Exemplary expression products include small RNAs. In various embodiments, integration of all or a portion of a donor vector payload into a host cell genome is not required in order for delivery to the target cell of a donor vector or genome to produce an intended or target effect, e.g., in certain instances in which the intended or target effect includes editing of the host cell genome by a CRISPR system or base editor system. In various embodiments, integration of all or a portion of a donor vector payload is required or preferred in order for delivery to the target cell of a donor vector or genome to produce an intended or target effect, e.g., where expression of a payload-encoded expression product is desired in progeny cells of a transduced target cell. In various embodiments, a payload can include a nucleic acid sequence engineered for integration into a host cell genome (an “integration element”), e.g., by recombination or transposition.

[0311] A gene sequence encoding one or more therapeutic proteins can be readily prepared by synthetic or recombinant methods from the relevant amino acid sequence. In particular embodiments, the gene sequence encoding any of these sequences can also have one or more restriction enzyme sites at the 5′ and/or 3′ ends of the coding sequence in order to provide for easy excision and replacement of the gene sequence encoding the sequence with another gene sequence encoding a different sequence. In particular embodiments, the gene sequence encoding the sequences can be codon optimized for expression in mammalian cells.

[0312] Particular examples of therapeutic genes and/or gene products include γ-globin, Factor VIII, 1C, JAK3, IL7RA, RAG1, RAG2, DCLRE1C, PRKDC, LIG4, NHEJ1, CD3D, CD3E, CD3Z, CD3G, PTPRC, ZAP70, LCK, AK2, ADA, PNP, WHN, CHD7, ORAI1, STIM1, CORO1A, CIITA, RFXANK, RFX5, RFXAP, RMRP, DKC1, TERT, TINF2, DCLRE1B, and SLC46A1; FANC family genes including FancA, FancB, FancC, FancD1 (BRCA2), FancD2, FancE, FancF, FancG, Fancl, FancJ (BRIP1), FancL, FancM, FancN (PALB2), FancO (RAD51C), FancP (SLX4), FancQ (ERCC4), FancR (RAD51), FancS (BRCA1), FancT (UBE2T), FancU (XRCC2), FancV (MAD2L2), and FancW (RFWD3); soluble CD40; CTLA; Fas L; antibodies to CD4, CD5, CD7, CD52, etc.; antibodies to IL1, IL2, IL6; an antibody to TCR specifically present on autoreactive T cells; IL4; IL10; IL12; 1L13; IL1Ra, sIL1RI, sIL1R11; sTNFRI; sTNFRII; antibodies to TNF; P53, PTPN22, and DRB1*1501/DQB1*0602; globin family genes; WAS; phox; dystrophin; pyruvate kinase; CLN3; ABCD1; arylsulfatase A; SFTPB; SFTPC; NLX2.1; ABCA3; GATA1; ribosomal protein genes; TERT; TERC; DKC1; TINF2; CFTR; LRRK2; PARK2; PARK7; PINK1; SNCA; PSEN1; PSEN2; APP; SOD1; TDP43; FUS; ubiquilin 2; C9ORF72 and other therapeutic genes described herein.

[0313] A therapeutic gene can be selected to provide a therapeutically effective response against diseases related to red blood cells and clotting. In particular embodiments, the disease is a hemoglobinopathy like thalassemia, or a sickle cell disease/trait. The therapeutic gene may be, for example, a gene that induces or increases production of hemoglobin; induces or increases production of β-globin, γ-globin, or α-globin; or increases the availability of oxygen to cells in the body. The therapeutic gene may be, for example, HBB or CYB5R3. Exemplary effective treatments may, for example, increase blood cell counts, improve blood cell function, or increase oxygenation of cells in patients. In another particular embodiment, the disease is hemophilia. The therapeutic gene may be, for example, a gene that increases the production of coagulation/clotting factor VIII or coagulation/clotting factor IX, causes the production of normal versions of coagulation factor VIII or coagulation factor IX, a gene that reduces the production of antibodies to coagulation/clotting factor VIII or coagulation/clotting factor IX, or a gene that causes the proper formation of blood clots. Exemplary therapeutic genes include F8 and F9. Exemplary effective treatments may, for example, increase or induce the production of coagulation/clotting factors VIII and IX; improve the functioning of coagulation/clotting factors VIII and IX, or reduce clotting time in subjects.

[0314] In various embodiments of the present disclosure, a donor vector encodes a globin gene, wherein the globin protein encoded by the globin gene is selected from a γ-globin, a β-globin, and/or an α-globin. Globin genes of the present disclosure can include, e.g., one or more regulatory sequences such as a promoter operably linked to a nucleic acid sequence encoding a globin protein. As those of skill in the art will appreciate, each of γ-globin, β-globin, and/or α-globin is a component of fetal and/or adult hemoglobin and is therefore useful in various vectors disclosed herein.

[0315] In various embodiments, increasing expression of a globin protein can refer to any of one or more of (i) increasing the amount, concentration, or expression (e.g., transcription or translation of nucleic acids encoding) in a cell or system of globin protein having a particular sequence; (ii) increasing the amount, concentration, or expression (e.g., transcription or translation of nucleic acids encoding) in a cell or system of globin protein of a particular type (e.g., the total amount of all proteins that would be identified as γ-globin (or alternatively β-globin or α-globin) by those of skill in the art or as set forth in the present specification) without respect to the sequences of the proteins relative to each other; and/or (iii) expressing in a cell or system a heterologous globin protein, e.g., a globin protein not encoded by a host cell prior to gene therapy.

[0316] The following references describe particular exemplary sequences of functional globin genes. References 1˜4 relate to α-type globin sequences and references 4-12 relate to β-type globin sequences (including β and γ globin sequences), which sequences are hereby incorporated by reference: (1) GenBank Accession No. Z84721 (Mar. 19, 1997); (2) GenBank Accession No. NM_000517 (Oct. 31, 2000); (3) Hardison et al., J. Mol. Biol. (1991) 222(2):233-249; (4) A Syllabus of Human Hemoglobin Variants (1996), by Titus et al., published by The Sickle Cell Anemia Foundation in Augusta, Ga. (available online at globin.cse.psu.edu); (5) GenBank Accession No. J00179 (Aug. 26, 1993); (6) Tagle et al., Genomics (1992) 13(3):741-760; (7) Grovsfeld et al., Cell (1987) 51(6):975-985; (8) Li et al., Blood (1999) 93(7):2208-2216; (9) Gorman et al., J. Biol. Chem. (2000) 275(46):35914-35919; (10) Slightom et al., Cell (1980) 21(3):627-638; (11) Fritsch et al., Cell (1980) 19(4): 959-972; (12) Marotta et al., J. Biol. Chem. (1977) 252(14):5040-5053. For additional coding and non-coding regions of genes encoding globins see, for example, by Marotta et al., Prog. Nucleic Acid Res. Mol. Biol. 19, 165-175, 1976, Lawn et al., Cell 21 (3), 647-651, 1980, and Sadelain et al., PNAS.; 92:6728-6732, 1995.

[0317] An exemplary amino acid sequence of hemoglobin subunit β is provided, for example, at NCBI Accession No. P68871. An exemplary amino acid sequence for β-globin is provided, for example, at NCBI Accession No. NP_000509.

[0318] In addition to therapeutic genes and/or gene products, the transgene can also encode for therapeutic molecules, such as checkpoint inhibitor reagents, chimeric antigen receptor molecules specific to one or more cancer antigens, and/or T-cell receptors specific to one or more cancer antigens.

[0319] As another example, a therapeutic gene can be selected to provide a therapeutically effective response against a lysosomal storage disorder. In particular embodiments, the lysosomal storage disorder is mucopolysaccharidosis (MPS), type I; MPS II or Hunter Syndrome; MPS III or Sanfilippo syndrome; MPS IV or Morquio syndrome; MPS V; MPS VI or Maroteaux-Lamy syndrome; MPS VII or sly syndrome; α-mannosidosis; β-mannosidosis; glycogen storage disease type I, also known as GSDI, von Gierke disease, or Tay Sachs; Pompe disease; Gaucher disease; Fabry disease. The therapeutic gene may be, for example a gene encoding or inducing production of an enzyme, or that otherwise causes the degradation of mucopolysaccharides in lysosomes. Exemplary therapeutic genes include IDUA or iduronidase, IDS, GNS, HGSNAT, SGSH, NAGLU, GUSB, GALNS, GLB1, ARSB, and HYAL1. Exemplary effective genetic therapies for lysosomal storage disorders may, for example, encode or induce the production of enzymes responsible for the degradation of various substances in lysosomes; reduce, eliminate, prevent, or delay the swelling in various organs, including the head (exp. Macrosephaly), the liver, spleen, tongue, or vocal cords; reduce fluid in the brain; reduce heart valve abnormalities; prevent or dilate narrowing airways and prevent related upper respiratory conditions like infections and sleep apnea; reduce, eliminate, prevent, or delay the destruction of neurons, and/or the associated symptoms.

[0320] As another example, a therapeutic gene can be selected to provide a therapeutically effective response against a hyperproliferative disease. In particular embodiments, the hyperproliferative disease is cancer. The therapeutic gene may be, for example, a tumor suppressor gene, a gene that induces apoptosis, a gene encoding an enzyme, a gene encoding an antibody, or a gene encoding a hormone. Exemplary therapeutic genes and gene products include (in addition to those listed elsewhere herein) 101F6, 123F2 (RASSFI), 53BP2, abl, ABLI, ADP, aFGF, APC, ApoAl, ApoAlV, ApoE, ATM, BAI-1, BDNF, Beta*(BLU), bFGF, BLC1, BLC6, BRCA1, BRCA2, CBFA1, CBL, C-CAM, CNTF, COX-1, CSFIR, CTS-1, cytosine deaminase, DBCCR-1, DCC, Dp, DPC-4, EIA, E2F, EBRB2, erb, ERBA, ERBB, ETS1, ETS2, ETV6, Fab, FCC, FGF, FGR, FHIT, fms, FOX, FUS1, FYN, G-CSF, GDAIF, Gene 21 (NPRL2), Gene 26 (CACNA2D2), GM-CSF, GMF, gsp, HCR, HIC-1, HRAS, hst, IGF, IL-1, IL-2, IL-3, IL-5, IL-6, IL-7, IL-8, IL-9, IL-11, ING1, interferon α, interferon β, interferon γ, IRF-1, JUN, KRAS, LUCA-1 (HYAL1), LUCA-2 (HYAL2), LYN, MADH4, MADR2, MCC, mda7, MDM2, MEN-I, MEN-II, MLL, MMAC1, MYB, MYC, MYCL1, MYCN, neu, NF-1, NF-2, NGF, NOEY1, NOEY2, NRAS, NT3, NT5, OVCA1, p16, p21, p27, p57, p73, p300, PGS, PIM1, PL6, PML, PTEN, raf, Rap1A, ras, Rb, RBI, RET, rks-3, ScFv, scFV ras, SEM A3, SRC, TALI, TCL3, TFPI, thrombospondin, thymidine kinase, TNF, TP53, trk, T-VEC, VEGF, VHL, VVT1, WT-1, YES, and zac1. Exemplary effective genetic therapies may suppress or eliminate tumors, result in a decreased number of cancer cells, reduced tumor size, slow or eliminate tumor growth, or alleviate symptoms caused by tumors.

[0321] As another example, a therapeutic gene can be selected to provide a therapeutically effective response against an infectious disease. In particular embodiments, the infectious disease is human immunodeficiency virus (HIV). The therapeutic gene may be, for example, a gene rendering immune cells resistant to HIV infection, or which enables immune cells to effectively neutralize the virus via immune reconstruction, polymorphisms of genes encoding proteins expressed by immune cells, genes advantageous for fighting infection that are not expressed in the patient, genes encoding an infectious agent, receptor or coreceptor; a gene encoding ligands for receptors or coreceptors; viral and cellular genes essential for viral replication including; a gene encoding ribozymes, antisense RNA, small interfering RNA (siRNA) or decoy RNA to block the actions of certain transcription factors; a gene encoding dominant negative viral proteins, intracellular antibodies, intrakines and suicide genes. Exemplary therapeutic genes and gene products include a2p1; avp3; avp5; avp63; BOB/GPR15; Bonzo/STRL-33/TYMSTR; CCR2; CCR3; CCR5; CCR8; CD4; CD46; CD55; CXCR4; aminopeptidase-N; HHV-7; ICAM; ICAM-1; PRR2/HveB; HveA; α-dystroglycan; LDLR/a2MR/LRP; PVR; PRR1/HveC; and laminin receptor. A therapeutically effective amount for the treatment of HIV, for example, may increase the immunity of a subject against HIV, ameliorate a symptom associated with AIDS or HIV, or induce an innate or adaptive immune response in a subject against HIV. An immune response against HIV may include antibody production and result in the prevention of AIDS and/or ameliorate a symptom of AIDS or HIV infection of the subject, or decrease or eliminate HIV infectivity and/or virulence.

[0322] In various embodiments, a vector or genome of the present disclosure, e.g., an Ad35 helper vector or Ad35 helper genome, encodes and/or expresses an Anti-CRISPR (Acr) protein, e.g., derived from phage, that inhibits normal activity of CRISPR/Cas.

### I(C)(i)(a). Binding Domain, Antibody, CAR, and TCR Payload Expression Products

[0323] The present disclosure includes a variety of binding domains. Antibodies are one example of binding domains and include whole antibodies or binding fragments of an antibody, e.g., Fv, Fab, Fab′, F(ab′)2, and single chain (sc) forms and fragments thereof (e.g., scFvs) that bind specifically to a cellular marker. Antibodies or antigen binding fragments can include all or a portion of polyclonal antibodies, monoclonal antibodies, human antibodies, humanized antibodies, synthetic antibodies, non-human antibodies, recombinant antibodies, chimeric antibodies, bispecific antibodies, mini bodies, and linear antibodies. Functional fragments thereof, include a single-domain antibody such as a heavy chain variable domain (VH), a light chain variable domain (VL) and a variable domain (VHH) of camelid derived nanobody, and the like.

[0324] In some instances, scFvs can be prepared according to methods known in the art (see, for example, Bird et al., Science 242:423-426, 1988; and Huston et al., Proc. Natl. Acad. Sci. USA 85:5879-5883, 1988). ScFv molecules can be produced by linking VL and VH regions of an antibody together using flexible polypeptide linkers. If a short polypeptide linker is employed (e.g., between 5-10 amino acids) intrachain folding is prevented. Interchain folding is also required to bring the two variable regions together to form a functional epitope binding site. For examples of linker orientations and sizes see, e.g., Hollinger et al. 1993 Proc Natl Acad. Sci. U.S.A. 90:6444-6448, US 2005/0100543, US 2005/0175606, US 2007/0014794, WO2006/020258, and WO2007/024715.

[0325] An scFv can include a linker of at least 1, 2, 3, 4, 5, 6, 7, 8, 9, 10, 11, 12, 13, 14, 15, 16, 17, 18, 19, 20, 25, 30, 35, 40, 45, 50, or more amino acid residues between its VL and VH regions. In particular embodiments, the linker sequence may include any naturally occurring amino acid. Generally, linker sequences that are used to connect the VL and VH of an scFv are five to 35 amino acids in length. In particular embodiments, a VL-VH linker includes from five to 35, ten to 30 amino acids or from 15 to 25 amino acids. Variation in the linker length may retain or enhance activity, giving rise to superior efficacy in activity studies.

[0326] In some embodiments, the linker sequence of an scFv includes the amino acids glycine and serine. In particular embodiments, the linker sequence includes sets of glycine and serine repeats such as from one to ten repeats of (GlyxSery)n, wherein x and y are independently an integer from 0 to 10 provided that x and y are not both 0 and wherein n is an integer of 1, 2, 3, 4, 5, 6, 7, 8, 9 or 10) and wherein linked VH-VL regions form a functional immunoglobulin-like binding domain (e.g., scFv, scTCR). Particular examples include (Gly4Ser)n, (Gly3Ser)n(Gly4Ser)n, (Gly3Ser)n(Gly2Ser)n, (Gly3Ser)n(Gly4Ser)1, (Gly4Ser)1, (Gly3Ser)1, or (Gly2Ser)1. In particular embodiments, the linker is (Gly4Ser)4 or (Gly4Ser)3. As indicated through reference to scTCR above, such linkers can also be used to link T cell receptor Vα/β and Cα/β chains (e.g., Vα-Cα, Vβ-Cβ, Vα-Vβ).

[0327] Additional examples include scFv-based grababodies and soluble VH domain antibodies.

[0328] These antibodies form binding regions using only heavy chain variable regions. See, for example, Jespers et al., Nat. Biotechnol. 22:1161, 2004; Cortez-Retamozo et al., Cancer Res. 64:2853, 2004; Baral et al., Nature Med. 12:580, 2006; and Barthelemy et al., J. Biol. Chem. 283:3639, 2008.

[0329] In some instances, it is beneficial for the binding domain to be derived from the same species it will ultimately be used in. For example, for use in humans, it may be beneficial for the antigen binding domain to include a human antibody, humanized antibody, or a fragment or engineered form thereof. Antibodies from human origin or humanized antibodies have lowered or no immunogenicity in humans and have a lower number of non-immunogenic epitopes compared to non-human antibodies. Antibodies and their engineered fragments will generally be selected to have a reduced level or no antigenicity in human subjects.

[0330] In particular embodiments, the binding domain includes a humanized antibody or an engineered fragment thereof. In particular embodiments, a non-human antibody is humanized, where one or more amino acid residues of the antibody are modified to increase similarity to an antibody naturally produced in a human or fragment thereof. These nonhuman amino acid residues are often referred to as “import” residues, which are typically taken from an “import” variable domain. As provided herein, humanized antibodies or antibody fragments include one or more CDRs from nonhuman immunoglobulin molecules and framework regions wherein the amino acid residues including the framework are derived completely or mostly from human germline. In one aspect, the antigen binding domain is humanized. A humanized antibody can be produced using a variety of techniques known in the art, including CDR-grafting (see, e.g., European Patent No. EP 239,400; WO 91/09967; and U.S. Pat. Nos. 5,225,539, 5,530,101, and 5,585,089), veneering or resurfacing (see, e.g., EP 592,106 and EP 519,596; Padlan, 1991, Molecular Immunology, 28(4/5):489-498; Studnicka et al., 1994, Protein Engineering, 7(6):805-814; and Roguska et al., PNAS, 91:969-973, 1994), chain shuffling (see, e.g., U.S. Pat. No. 5,565,332), and techniques disclosed in, e.g., US 2005/0042664, US 2005/0048617, U.S. Pat. Nos. 6,407,213, 5,766,886, WO 9317105, Tan et al., J. Immunol., 169:1119-25, 2002, Caldas et al., Protein Eng., 13(5):353-60, 2000, Morea et al., Methods, 20(3):267-79, 2000, Baca et al., J. Biol. Chem., 272(16): 10678-84, 1997, Roguska et al., Protein Eng., 9(10):895-904, 1996, Couto et al., Cancer Res., 55 (23 Supp):5973s-5977s, 1995, Couto et al., Cancer Res., 55(8):1717-22, 1995, Sandhu, Gene, 150(2):409-10, 1994, and Pedersen et al., J. Mol. Biol., 235(3):959-73, 1994. Often, framework residues in the framework regions will be substituted with the corresponding residue from the CDR donor antibody to alter, for example improve, cellular marker binding. These framework substitutions are identified by methods well-known in the art, e.g., by modeling of the interactions of the CDR and framework residues to identify framework residues important for cellular marker binding and sequence comparison to identify unusual framework residues at particular positions. (See, e.g., U.S. Pat. No. 5,585,089; and Riechmann et al., Nature, 332:323, 1988).

[0331] Antibodies and other binding domains that specifically bind a particular cellular marker can be prepared using methods of obtaining monoclonal antibodies, methods of phage display, methods to generate human or humanized antibodies, or methods using a transgenic animal or plant engineered to produce antibodies as is known to those of ordinary skill in the art (see, for example, U.S. Pat. Nos. 6,291,161 and 6,291,158). Phage display libraries of partially or fully synthetic antibodies are available and can be screened for an antibody or fragment thereof that can bind to a cellular marker. For example, binding domains may be identified by screening a Fab phage library for Fab fragments that specifically bind to a cellular marker of interest (see Hoet et al., Nat. Biotechnol. 23:344, 2005). Phage display libraries of human antibodies are also available. Additionally, traditional strategies for hybridoma development using a cellular marker of interest as an immunogen in convenient systems (e.g., mice, HuMAb Mouse® (GenPharm Intl. Inc., Mountain View, Calif.), TC Mouse® (Kirin Pharma Co. Ltd., Tokyo, JP), KM-Mouse® (Medarex, Inc., Princeton, N.J.), llamas, chicken, rats, hamsters, rabbits, etc.) can be used to develop binding domains. In particular embodiments, antibodies specifically bind to a cellular marker preferentially expressed by a particular cancer cell type and do not cross react with nonspecific components or unrelated targets. Once identified, the amino acid sequence of the antibody and gene sequence encoding the antibody can be isolated and/or determined.

[0332] In particular embodiments, a therapeutic gene can encode an antibody or a binding fragment of an antibody, such as a Fab or an scFv. Exemplary antibodies (including scFvs) that can be expressed include those provided described in WO2014/164553A1, US2017/0283504, U.S. Pat. Nos. 7,083,785, 10,189,906, 10,174,095, WO2005102387, US2011/0206701A1, WO2014/179759A1, US2018/0037651A1, US2018/0118822A1, WO2008/047242A2, WO1996/016990A1, WO200/5103083A2, and WO1999/062526A2. Antibodies described above in relation to binding domains can also be used, as well as atezolizumab, blinatumomab, brentuximab, cetuximab, cirmtuzumab, farletuzumab, gemtuzumab, OKT3, oregovomab, promiximab, pembrolizumab, and trastuzumab.

[0333] Immune checkpoint inhibitors can also be used. Immune checkpoint inhibitors refer to compounds that inhibit the function of an immune inhibitory checkpoint protein. Inhibition includes reduction of function and full blockade. Preferred immune checkpoint inhibitors are antibodies that specifically recognize immune checkpoint proteins. A number of immune checkpoint inhibitors are known and in analogy of these known immune checkpoint protein inhibitors, alternative immune checkpoint inhibitors may be developed in the (near) future. The immune checkpoint inhibitors include peptides, antibodies, nucleic acid molecules and small molecules. In particular embodiments, immune checkpoint inhibitors enhance the proliferation, migration, persistence and/or cytoxicity activity of CD8+ T cells in a subject and in particular the tumor-infiltrating of CD8+ T cells of the subject. Another exemplary immune checkpoint inhibitor includes a checkpoint inhibitor as disclosed in Example 4. Accordingly, exemplary immune checkpoint inhibitors of the present disclosure include αPD-L1γ1 antibody (alternatively referred to as αPD-L1γ1). αPD-L1γ1 is further described in Engeland et al. Mol Ther 22(11):1949-1959, 2014, which is herein incorporated by reference in its entirety and in particular with respect to anti-PD-L1 antibodies, nucleic acids encoding the same, and uses thereof.

[0334] Examples of PD-1 and PD-L1 antibodies are described in U.S. Pat. Nos. 7,488,802; 7,943,743; 8,008,449; 8,168,757; 8,217,149, WO03042402, WO2008156712, WO2010089411, WO2010036959, WO2011066342, WO2011159877, WO2011082400, and WO2011161699. In some embodiments, the PD-1 blockers include anti-PD-L1 antibodies. In certain other embodiments the PD-1 blockers include anti-PD-1 antibodies and similar binding proteins such as nivolumab (MDX 1106, BMS 936558, ONO 4538), a fully human IgG4 antibody that binds to and blocks the activation of PD-1 by its ligands PD-L1 and PD-L2; lambrolizumab (MK-3475 or SCH 900475), a humanized monoclonal IgG4 antibody against PD-1; CT-011 a humanized antibody that binds PD-1; AMP-224 is a fusion protein of B7-DC; an antibody Fc portion; BMS-936559 (MDX-1105-01) for PD-L1 (B7-H1) blockade.

[0335] Other immune-checkpoint inhibitors include lymphocyte activation gene-3 (LAG-3) inhibitors, such as IMP321, a soluble Ig fusion protein (Brignone et al., 2007, J. Immunol. 179:4202-4211). Other immune-checkpoint inhibitors include B7 inhibitors, such as B7-H3 and B7-H4 inhibitors. In particular, the anti-B7-H3 antibody MGA271 (Loo et al., 2012, Clin. Cancer Res. July 15 (18) 3834). Also included are TIM3 (T-cell immunoglobulin domain and mucin domain 3) inhibitors (Fourcade et al., J. Exp. Med. 207:2175-86, 2010 and Sakuishi et al., J. Exp. Med. 207:2187-94, 2010). As used herein, the term “TIM-3” has its general meaning in the art and refers to T cell immunoglobulin and mucin domain-containing molecule 3. The natural ligand of TIM-3 is galectin 9 (Ga19). Accordingly, the term “TIM-3 inhibitor” as used herein refers to a compound, substance or composition that can inhibit the function of TIM-3. For example, the inhibitor can inhibit the expression or activity of TIM-3, modulate or block the TIM-3 signaling pathway and/or block the binding of TIM-3 to galectin-9. Antibodies having specificity for TIM-3 are well known in the art and typically those described in WO2011/155607, WO2013/006490 and WO2010/117057.

[0336] Additional particular immune checkpoint inhibitors include atezolizumab, BMS-936559, ipilimumab, MEDI0680, MEDI4736, MSB0010718C, pembrolizumab, pidilizumab, and tremelimumab. See also WO 1998/42752; WO 2000/37504; WO 2001/014424; WO 2004/035607; US 2005/0201994; US 2002/0039581; US 2002/086014; U.S. Pat. Nos. 5,811,097; 5,855,887; 5,977,318; 6,051,227; 6,984,720; 6,682,736; 6,207,156; 6,682,736; 7,109,003; 7,132,281; EP1212422B1; Hurwitz et al., Proc. Natl. Acad. Sci. USA, 95(17):10067-10071 (1998); Camacho et al., J. Clin. Oncology, 22(145): Abstract No. 2505, 2004 (antibody CP-675206); and Mokyr et al., Cancer Res, 58:5301-5304, 1998.

[0337] The present disclosure further includes antibodies and other binding domains that bind CD4, CD5, CD7, CD52, etc.; antibodies; antibodies to IL1, IL2, IL6; an antibody to TCR specifically present on autoreactive T cells; IL4; IL10; 1L12; 1L13; IL1Ra; sIL1 RI; sIL1R11; antibodies to TNF; ABCA3; ABCD1; ADA; AK2; APP; arginase; arylsulfatase A; AIAT; CD3D; CD3E; CD3G; CD3Z; CFTR; CHD7; chimeric antigen receptor (CAR); CIITA; CLN3; complement factor, COROIA; CTLA; C1 inhibitor; C9ORF72; DCLREIB; DCLREIC; decoy receptors; DKC1; DRB1*1501/DQB1*0602; dystrophin; enzymes; Factor VIII, FANC family genes (FancA, FancB, FancC, FancD1 (BRCA2), FancD2, FancE, FancF, FancG, Fancl, FancJ (BRIP1), FancL, FancM, FancN (PALB2), FancO (RAD51C), FancP (SLX4), FancQ (ERCC4), FancR (RAD51), FancS (BRCA1), FancT (UBE2T), FancU (XRCC2), FancV (MAD2L2), and FancW (RFWD3)); Fas L; FUS; GATA1; globin family genes (ie. γ-globin); F8; glutaminase; HBA1; HBA2; HBB; IL7RA; JAK3; LCK; LIG4; LRRK2; NHEJ1; NLX2.1; neutralizing antibodies; ORAI1; PARK2; PARK7; phox; PINK1; PNP; PRKDC; PSEN1; PSEN2; PTPN22; PTPRC; P53; pyruvate kinase; RAG1; RAG2; RFXANK; RFXAP; RFX5; RMRP; ribosomal protein genes; SFTPB; SFTPC; SOD1; soluble CD40; STIM1; sTNFRI; sTNFRII; SLC46A1; SNCA; TDP43; TERT; TERC; TINF2; ubiquilin 2; WAS; WHN; ZAP70; yC; and other therapeutic genes described herein.

[0338] An alternative source of binding domains includes sequences that encode random peptide libraries or sequences that encode an engineered diversity of amino acids in loop regions of alternative non-antibody scaffolds, such as scTCR (see, e.g., Lake et al., Int. Immunol. 11:745, 1999; Maynard et al., J. Immunol. Methods 306:51, 2005; U.S. Pat. No. 8,361,794), fibrinogen domains (see, e.g., Weisel et al., Science 230:1388, 1985), Kunitz domains (see, e.g., U.S. Pat. No. 6,423,498), designed ankyrin repeat proteins (DARPins; Binz et al., J. Mol. Biol. 332:489, 2003 and Binz et al., Nat. Biotechnol. 22:575, 2004), fibronectin binding domains (adnectins or monobodies; Richards et al., J. Mol. Biol. 326:1475, 2003; Parker et al., Protein Eng. Des. Selec. 18:435, 2005 and Hackel et al., J. Mol. Biol. 381:1238-1252, 2008), cysteine-knot miniproteins (Vita et al., 1995, Proc. Nat'l. Acad. Sci. (USA) 92:6404-6408; Martin et al., 2002, Nat. Biotechnol. 21:71, 2002 and Huang et al., Structure 13:755, 2005), tetratricopeptide repeat domains (Main et al., Structure 11:497, 2003 and Cortajarena et al., ACS Chem. Biol. 3:161, 2008), leucine-rich repeat domains (Stumpp et al., J. Mol. Biol. 332:471, 2003), lipocalin domains (see, e.g., WO 2006/095164, Beste et al., Proc. Nat'l. Acad. Sci. (USA) 96:1898, 1999 and Schonfeld et al., Proc. Nan. Acad. Sci. (USA) 106:8198, 2009), V-like domains (see, e.g., US 2007/0065431), C-type lectin domains (Zelensky and Gready, FEBS J. 272:6179, 2005; Beavil et al., Proc. Nan. Acad. Sci. (USA) 89:753, 1992 and Sato et al., Proc. Nan. Acad. Sci. (USA) 100:7779, 2003), mAb2 or Fc-region with antigen binding domain (Fcab™ (F-Star Biotechnology, Cambridge UK; see, e.g., WO 2007/098934 and WO 2006/072620), armadillo repeat proteins (see, e.g., Madhurantakam et al., Protein Sci. 21: 1015, 2012; WO 2009/040338), affilin (Ebersbach et al., J. Mol. Biol. 372: 172, 2007), affibody, avimers, knottins, fynomers, atrimers, cytotoxic T-lymphocyte associated protein-4 (Weidle et al., Cancer Gen. Proteo. 10:155, 2013), or the like (Nord et al., Protein Eng. 8:601, 1995; Nord et al., Nat. Biotechnol. 15:772, 1997; Nord et al., Euro. J. Biochem. 268:4269, 2001; Binz et al., Nat. Biotechnol. 23:1257, 2005; Boersma and Plückthun, Curr. Opin. Biotechnol. 22:849, 2011).

[0339] Peptide aptamers include a peptide loop (which is specific for a cellular marker) attached at both ends to a protein scaffold. This double structural constraint increases the binding affinity of peptide aptamers to levels comparable to antibodies. The variable loop length is typically 8 to 20 amino acids and the scaffold can be any protein that is stable, soluble, small, and non-toxic. Peptide aptamer selection can be made using different systems, such as the yeast two-hybrid system (e.g., Gal4 yeast-two-hybrid system), or the LexA interaction trap system.

[0340] In particular embodiments, a binding domain binds the cellular marker CD33. In particular embodiments, the binding domain that binds CD33 is derived from one of gemtuzumab, aclizumab, or HuM195. In particular embodiments a CD33 binding domain is a human or humanized binding domain including a variable light chain including a CDRL1 sequence including SEQ ID NO: 91, a CDRL2 sequence including SEQ ID NO: 92, and a CDRL3 sequence including SEQ ID NO: 93, and a variable heavy chain including a CDRH1 sequence including SEQ ID NO: 94, a CDRH2 sequence including SEQ ID NO: 95, and a CDRH3 sequence including SEQ ID NO: 96.

[0341] In particular embodiments, a CD33 binding domain is a human or humanized scFv including a variable light chain including a CDRL1 sequence including SEQ ID NO: 97, a CDRL2 sequence including SEQ ID NO: 98, and a CDRL3 sequence including SEQ ID NO: 99, and a variable heavy chain including a CDRH1 sequence including SEQ ID NO: 100, a CDRH2 sequence including SEQ ID NO: 101, and a CDRH3 sequence including SEQ ID NO: 102. For more information regarding binding domains that bind CD33, see U.S. Pat. No. 8,759,494.

[0342] In particular embodiments, a sequence that binds human CD33 includes a variable light chain region including sequence SEQ ID NO: 103, and a variable heavy chain region including sequence SEQ ID NO: 104. In particular embodiments, a sequence that binds human CD33 includes a variable light chain region including sequence SEQ ID NO: 103, and a variable heavy chain region including sequence SEQ ID NO: 106.

[0343] In particular embodiments, a binding domain binds full-length CD33 (CD33FL). In particular embodiments, the binding domain that binds CD33FL is derived from at least one of 5D12, 8F5, 1H7, lintuzumab, or gemtuzumab. In particular embodiments, a CD33FL binding domain is human or humanized, including a variable light chain including a CDRL1 sequence including SEQ ID NO: 107, a CDRL2 sequence including SEQ ID NO: 108, a CDRL3 sequence including SEQ ID NO: 109), a CDRH1 sequence including SEQ ID NO: 110, a CDRH2 sequence including SEQ ID NO: 111, and a CDRH3 sequence including SEQ ID NO: 112. For more information regarding binding domains that bind CD33FL, see PCT/US17/42264.

[0344] In particular embodiments, a binding domain that binds human CD33FL includes a variable light chain region including sequence SEQ ID NO: 113), and a variable heavy chain region including sequence SEQ ID NO: 114.

[0345] In particular embodiments, a binding domain binds the cellular marker CD33DeltaE2 (CD33ΔE2). In particular embodiments, the binding domain that binds CD33ΔE2 is derived from at least one of 12B12, 4H10, 11D5, 13E11, 11D11, or 1H7. In particular embodiments, an CD33ΔE2 binding domain is human or humanized and includes a variable light chain including a CDRL1 sequence including SEQ ID NO: 115, a CDRL2 sequence including SEQ ID NO: 116, a CDRL3 sequence including SEQ ID NO: 117, a CDRH1 sequence including SEQ ID NO: 118, a CDRH2 sequence including SEQ ID NO: 11), and a CDRH3 sequence including SEQ ID NO: 120. For more information regarding binding domains that bind CD33ΔE2, see PCT/US17/42264.

[0346] In particular embodiments, a sequence that binds human CD33ΔE2 includes a variable light chain region including sequence SEQ ID NO: 121, and a variable heavy chain region including sequence SEQ ID NO: 122.

[0347] In particular embodiments, a binding domain binds the cellular marker Her2. In particular embodiments, the binding domain that binds HER2 is derived from trastuzumab (Herceptin). In particular embodiments, the binding domain includes a variable light chain including a CDRL1 sequence including SEQ ID NO: 12), a CDRL2 sequence including SEQ ID NO: 124, and a CDRL3 sequence including SEQ ID NO: 125, and a variable heavy chain including a CDRH1 sequence including SEQ ID NO: 126, a CDRH2 sequence including SEQ ID NO: 127, and a CDRH3 sequence including SEQ ID NO: 128.

[0348] In particular embodiments, a binding domain binds the cellular marker PD-L1. In particular embodiments, the binding domain that binds PD-L1 is derived from at least one of pembrolizumab or FAZ053 (Novartis). In particular embodiments, the binding domain includes a variable light chain including a CDRL1 sequence including SEQ ID NO: 129, a CDRL2 sequence including SEQ ID NO: 130, and a CDRL3 sequence including SEQ ID NO: 131, and a variable heavy chain including a CDRH1 sequence including SEQ ID NO: 132, a CDRH2 sequence including SEQ ID NO: 133, and a CDRH3 sequence including SEQ ID NO: 134.

[0349] An exemplary binding domain for PD-L1 can include or be derived from Avelumab or Atezolizumab. In particular embodiments, the variable heavy chain of Avelumab includes SEQ ID NO: 135. In particular embodiments, the variable light chain of Avelumab includes SEQ ID NO: 136.

[0350] In particular embodiments, the CDR regions of Avelumab include: CDRH1 including SEQ ID NO: 137; CDRH2 including SEQ ID NO: 138; CDRH3 including SEQ ID NO: 139; CDRL1 including SEQ ID NO: 140; CDRL2 including SEQ ID NO: 141; and CDRL3 including SEQ ID NO: 142. In particular embodiments, the variable heavy chain of Atezolizumab includes SEQ ID NO: 143. In particular embodiments, the variable light chain of Atezolizumab includes SEQ ID NO: 144.

[0351] In particular embodiments, the CDR regions of Atezolizumab include: CDRH including SEQ ID NO: 145; CDRH2 including SEQ ID NO: 146; CDRH3 including SEQ ID NO: 147; CDRL1 including SEQ ID NO: 148; CDRL2 including SEQ ID NO: 149; and CDRL3 including SEQ ID NO: 150.

[0352] In particular embodiments, a binding domain binds the cellular marker PSMA. In particular embodiments, the binding domain includes a variable light chain including a CDRL1 sequence including SEQ ID NO: 151, a CDRL2 sequence including SEQ ID NO: 152, a CDRL3 sequence including SEQ ID NO: 153. In particular embodiments, the binding domain includes a variable heavy chain including a CDRH1 sequence including SEQ ID NO: 154, a CDRH2 sequence including SEQ ID NO: 155, and a CDRH3 sequence including SEQ ID NO: 156.

[0353] In particular embodiments, a binding domain binds the cellular marker MUC16. In particular embodiments, the binding domain is human or humanized and includes a variable light chain including a CDRL1 sequence including SEQ ID NO: 157, a CDRL2 sequence including GAS, a CDRL3 sequence including SEQ ID NO: 158. In particular embodiments, the binding domain is human or humanized and includes a variable heavy chain including a CDRH1 sequence including SEQ ID NO: 159, a CDRH2 sequence including SEQ ID NO: 160, and a CDRH3 sequence including SEQ ID NO: 161.

[0354] In particular embodiments, a binding domain binds the cellular marker FOLR. In particular embodiments, the binding domain that binds FOLR is derived from farletuzumab. In particular embodiments, the binding domain includes a variable light chain including a CDRL1 sequence including SEQ ID NO: 162, a CDRL2 sequence including SEQ ID NO: 163, and a CDRL3 sequence including SEQ ID NO: 164, and a variable heavy chain including a CDRH1 sequence including SEQ ID NO: 165, a CDRH2 sequence including SEQ ID NO: 166, and a CDRH3 sequence including SEQ ID NO: 167.

[0355] An exemplary binding domain for mesothelin can include or be derived from Amatuximab. In particular embodiments, the variable heavy chain of Amatuximab includes SEQ ID NO: 168. In particular embodiments, the variable light chain of Amatuximab includes SEQ ID NO: 169.

[0356] In particular embodiments, the CDR regions of Amatuximab include: A CDRH1 sequence including SEQ ID NO: 170; a CDRH2 sequence including SEQ ID NO: 171; a CDRH3 sequence including SEQ ID NO: 172; a CDRL1 sequence including SEQ ID NO: 173; a CDRL2 sequence including (SEQ ID NO: 174; and a CDRL3 sequence including SEQ ID NO: 175.

[0357] In particular embodiments, a binding domain is a sc T cell receptor (scTCR) including Vα/β and Cα/β chains (e.g., Vα-Cα, Vβ-Cβ, Vα-Vβ) or including a Vα-Cα, Vβ-Cβ, Vα-Vβ pair specific for a cellular marker of interest (e.g., peptide-MHC complex).

[0358] In particular embodiments, a binding domain includes a sequence that is at least 90%, at least 91%, at least 92%, at least 93%, at least 94%, at least 95%, at least 96%, at least 97%, at least 98%, at least 99%, at least 99.5%, or 100% identical to an amino acid sequence of a known or identified TCR Vα, Vβ, Cα, or Cβ, wherein each CDR includes zero changes or at most one, two, or three changes, from a TCR or fragment or derivative thereof that specifically binds to the targeted cellular marker.

[0359] In particular embodiments, a binding domain includes Vα, Vβ, Cα, and/or Cβ regions derived from or based on a Vα, Vβ, Cα, and/or Cβ of a known or identified TCR (e.g., a high-affinity TCR) and includes one or more (e.g., 2, 3, 4, 5, 6, 7, 8, 9, 10) insertions, one or more (e.g., 2, 3, 4, 5, 6, 7, 8, 9, 10) deletions, one or more (e.g., 2, 3, 4, 5, 6, 7, 8, 9, 10) amino acid substitutions (e.g., conservative amino acid substitutions or non-conservative amino acid substitutions), or a combination of the above-noted changes, when compared with the Vα, Vβ, Cα, and/or Cβ of a known or identified TCR. An insertion, deletion or substitution may be anywhere in a Vα, Vβ, Cα, and/or Cβ region, including at the amino- or carboxy-terminus or both ends of these regions, provided that each CDR includes zero changes or at most one, two, or three changes and provides a target binding domain containing a modified Vα, Vβ, Cα, or Cβ region can still specifically bind its target with an affinity and action similar to wild type.

[0360] In particular embodiments, a binding domain includes or is a sequence that is at least 90%, at least 91%, at least 92%, at least 93%, at least 94%, at least 95%, at least 96%, at least 97%, at least 98%, at least 99%, at least 99.5%, or 100% identical to an amino acid sequence of a light chain variable region (VL) or to a heavy chain variable region (VH), or both, wherein each CDR includes zero changes or at most one, two, or three changes, from a monoclonal antibody or fragment or derivative thereof that specifically binds to a cellular marker of interest.

[0361] In particular embodiments, a VL region in a binding domain of the present disclosure is derived from or based on a VL of a known monoclonal antibody and contains one or more (e.g., 2, 3, 4, 5, 6, 7, 8, 9, 10) insertions, one or more (e.g., 2, 3, 4, 5, 6, 7, 8, 9, 10) deletions, one or more (e.g., 2, 3, 4, 5, 6, 7, 8, 9, 10) amino acid substitutions (e.g., conservative amino acid substitutions), ora combination of the above-noted changes, when compared with the VL of the known monoclonal antibody. An insertion, deletion or substitution may be anywhere in the VL region, including at the amino- or carboxy-terminus or both ends of this region, provided that each CDR includes zero changes or at most one, two, or three changes and provided a binding domain containing the modified VL region can still specifically bind its target with an affinity similar to the wild type binding domain.

[0362] In particular embodiments, a binding domain VH region of the present disclosure can be derived from or based on a VH of a known monoclonal antibody and can contain one or more (e.g., 2, 3, 4, 5, 6, 7, 8, 9, 10) insertions, one or more (e.g., 2, 3, 4, 5, 6, 7, 8, 9, 10) deletions, one or more (e.g., 2, 3, 4, 5, 6, 7, 8, 9, 10) amino acid substitutions (e.g., conservative amino acid substitutions or non-conservative amino acid substitutions), or a combination of the above-noted changes, when compared with the VH of a known monoclonal antibody. An insertion, deletion or substitution may be anywhere in the VH region, including at the amino- or carboxy-terminus or both ends of this region, provided that each CDR includes zero changes or at most one, two, or three changes and provided a binding domain containing the modified VH region can still specifically bind its target with an affinity similar to the wild type binding domain.

[0363] The precise amino acid sequence boundaries of a given CDR or FR can be readily determined using any of a number of well-known schemes, including those described by: Kabat et al. (1991) “Sequences of Proteins of Immunological Interest,” 5th Ed. Public Health Service, National Institutes of Health, Bethesda, Md. (Kabat numbering scheme); A1-Lazikani et al., J Mol Biol 273: 927-948, 1997 (Chothia numbering scheme); Maccallum et al., J Mol Biol 262: 732-745, 1996 (Contact numbering scheme); Martin et al., Proc. Natl. Acad. Sci., 86: 9268-9272, 1989 (AbM numbering scheme); Lefranc et al., Dev Comp Immunol 27(1): 55-77, 2003 (IMGT numbering scheme); and Honegger and Pluckthun, J Mol Biol 309(3): 657-670, 2001 (“Aho” numbering scheme). The boundaries of a given CDR or FR may vary depending on the scheme used for identification. For example, the Kabat scheme is based on structural alignments, while the Chothia scheme is based on structural information. Numbering for both the Kabat and Chothia schemes is based upon the most common antibody region sequence lengths, with insertions accommodated by insertion letters, for example, “30a,” and deletions appearing in some antibodies. The two schemes place certain insertions and deletions (“indels”) at different positions, resulting in differential numbering. The Contact scheme is based on analysis of complex crystal structures and is similar in many respects to the Chothia numbering scheme. In particular embodiments, the antibody CDR sequences disclosed herein are according to Kabat numbering.

[0364] Particular cellular markers associated with prostate cancer include PSMA, VVT1, ProstateStem Cell antigen (PSCA), and SV40 T. Particular cellular markers associated with breast cancer include HER2 and ERBB2. Particular cellular markers associated with ovarian cancer include L1-CAM, extracellular domain of MUC16 (MUC-CD), folate binding protein (folate receptor), Lewis Y, mesothelin, and WT-1. Particular cellular markers associated with pancreatic cancer include mesothelin, CEA and CD24. Particular cellular markers associated with multiple myeloma include BCMA, GPRCSD, CD38, and CS-1. Particular markers associated with leukemia and/or lymphoma include CLL-1, CD123, CD33, and PD-L1.

[0365] Also contemplated are binding domains specific for infectious disease agents, for instance by binding to an infectious agent antigen. These include for instance viral antigens or other viral markers, for instance which are expressed by virally-infected cells. Exemplary viruses include adenoviruses, arenaviruses, bunyaviruses, coronaviruses, flaviviruses, hantaviruses, hepadnaviruses, herpesviruses, papillomaviruses, paramyxoviruses, parvoviruses, picornaviruses, poxviruses, orthomyxoviruses, retroviruses, reoviruses, rhabdoviruses, rotaviruses, spongiform viruses or togaviruses. In additional embodiments, viral antigen markers include peptides expressed by CMV, cold viruses, Epstein-Barr, flu viruses, hepatitis A, B, and C viruses, herpes simplex, HIV, influenza, Japanese encephalitis, measles, polio, rabies, respiratory syncytial, rubella, smallpox, varicella zoster or West Nile virus.

[0366] As further particular examples, cytomegaloviral antigens include envelope glycoprotein B and CMV pp65; Epstein-Barr antigens include EBV EBNAI, EBV P18, and EBV P23; hepatitis antigens include the S, M, and L proteins of HBV, the pre-S antigen of HBV, HBCAG DELTA, HBV HBE, hepatitis C viral RNA, HCV NS3 and HCV NS4; herpes simplex viral antigens include immediate early proteins and glycoprotein D; HIV antigens include gene products of the gag, pol, and env genes such as HIV gp32, HIV gp41, HIV gp120, HIV gp160, HIV P17/24, HIV P24, HIV P55 GAG, HIV P66 POL, HIV TAT, HIV GP36, the Nef protein and reverse transcriptase; influenza antigens include hemagglutinin and neuraminidase; Japanese encephalitis viral antigens include proteins E, M-E, M-E-NS1, NS1, NS1-NS2A and 80% E; measles antigens include the measles virus fusion protein; rabies antigens include rabies glycoprotein and rabies nucleoprotein; respiratory syncytial viral antigens include the RSV fusion protein and the M2 protein; rotaviral antigens include VP7sc; rubella antigens include proteins E1 and E2; and varicella zoster viral antigens include gpI and gpII.

[0367] Additional particular exemplary viral antigen sequences include: Nef (66-97) (SEQ ID NO: 176), Nef (116-145) (SEQ ID NO: 177), Gag p17 (17-35) (SEQ ID NO: 178), Gag p17-p24 (253-284) (SEQ ID NO: 179), and Pol 325-355 (RT 158-188) (SEQ ID NO: 180). See Fundamental Virology, Second Edition, eds. Fields, B. N. and Knipe, D. M. (Raven Press, New York, 1991) for additional examples of viral antigens.

[0368] Significant progress has been made in genetically engineering T cells of the immune system to target and kill unwanted cell types, such as cancer cells. Many of these T cells have been genetically engineered to express chimeric antigen receptor (CAR) constructs. CARs are proteins including several distinct subcomponents that allow the genetically modified T cells to recognize and kill cancer cells. The subcomponents include at least an extracellular component and an intracellular component.

[0369] The extracellular component includes a binding domain that specifically binds a marker that is preferentially present on the surface of unwanted cells. When the binding domain binds such markers, the intracellular component directs the T cell to destroy the bound cancer cell. The binding domain is typically a single-chain variable fragment (scFv) derived from a monoclonal antibody (mAb), but it can be based on other formats which include an antibody-like antigen binding site.

[0370] The intracellular components provide activation signals based on the inclusion of an effector domain. First generation CARs utilized the cytoplasmic region of CD3 as an effector domain. Second generation CARs utilized CD3 in combination with cluster of differentiation 28 (CD28) or 4-1 BB (CD137), while third generation CARs have utilized CD3 in combination with CD28 and 401BB within intracellular effector domains.

[0371] CAR generally also include one or more linker sequences that are used for a variety of purposes within the molecule. For example, a transmembrane domain can be used to link the extracellular component of the CAR to the intracellular component. A flexible linker sequence often referred to as a spacer region that is membrane-proximal to the binding domain can be used to create additional distance between a binding domain and the cellular membrane. This can be beneficial to reduce steric hindrance to binding based on proximity to the membrane. A common spacer region used for this purpose is the IgG4 linker. More compact spacers or longer spacers can be used, depending on the targeted cell marker. Other potential CAR subcomponents are described in more detail elsewhere herein. Components of CAR are now described in additional detail as follows: (a) Binding Domains; (b) Intracellular Signalling Components; (c) Linkers; (d) Transmembrane Domains; (e) Junction Amino Acids; and (f) Control Features Including Tag Cassettes.

[0372] (a) Binding Domains. Binding domains include any substance that binds to a cellular marker to form a complex, including without limitation all binding domains and antibodies disclosed herein. The choice of binding domain can depend upon the type and number of cellular markers that define the surface of a target cell. Examples of binding domains include cellular marker ligands, receptor ligands, antibodies, peptides, peptide aptamers, receptors (e.g., T cell receptors), or combinations and engineered fragments or formats thereof.

[0373] (b) Intracellular Signaling Components. The intracellular or otherwise the cytoplasmic signaling components of a CAR are responsible for activation of the cell in which the CAR is expressed. The term “intracellular signaling components” or “intracellular components” is thus meant to include any portion of the intracellular domain sufficient to transduce an activation signal. Intracellular components of expressed CAR can include effector domains. An effector domain is an intracellular portion of a fusion protein or receptor that can directly or indirectly promote a biological or physiological response in a cell when receiving the appropriate signal. In certain embodiments, an effector domain is part of a protein or protein complex that receives a signal when bound, or it binds directly to a target molecule, which triggers a signal from the effector domain. An effector domain may directly promote a cellular response when it contains one or more signaling domains or motifs, such as an immunoreceptor tyrosine-based activation motif (ITAM). In other embodiments, an effector domain will indirectly promote a cellular response by associating with one or more other proteins that directly promote a cellular response, such as co-stimulatory domains.

[0374] Effector domains can provide for activation of at least one function of a modified cell upon binding to the cellular marker expressed by a cancer cell. Activation of the modified cell can include one or more of differentiation, proliferation and/or activation or other effector functions. In particular embodiments, an effector domain can include an intracellular signaling component including a T cell receptor and a co-stimulatory domain which can include the cytoplasmic sequence from co-receptor or co-stimulatory molecule.

[0375] An effector domain can include one, two, three or more receptor signaling domains, intracellular signaling components (e.g., cytoplasmic signaling sequences), co-stimulatory domains, or combinations thereof. Exemplary effector domains include signaling and stimulatory domains selected from: 4-IBB (CD137), CARD11, CD3γ, CD35, CD3E, CD3 CD27, CD28, CD79A, CD79B, DAP10, FcRα, FcR8 (FcεR1b), FcRγ, Fyn, HVEM (LIGHTR), ICOS, LAG3, LAT, Lck, LRP, NKG2D, NOTCH1, pTα, PTCH2, OX40, ROR2, Ryk, SLAMF1, Slp76, TCRa, TCRβ, TRIM, Wnt, Zap70, or any combination thereof. In particular embodiments, exemplary effector domains include signaling and co-stimulatory domains selected from: CD86, FcγRIIa, DAP12, CD30, CD40, PD-1, lymphocyte function-associated antigen-1 (LFA-1), CD2, CD7, LIGHT, NKG2C, B7-H3, a ligand that specifically binds with CD83, CDS, ICAM-1, GITR, BAFFR, SLAMF7, NKp80 (KLRF1), CD127, CD160, CD19, CD4, CD8a, CD8β, IL2Rβ, IL2Rγ, IL7Rα, ITGA4, VLA1, CD49a, IA4, CD49D, ITGA6, VLA-6, CD49f, ITGAD, CD11d, ITGAE, CD103, ITGAL, CD11a, ITGAM, CD11b, ITGAX, CD11c, ITGB1, CD29, ITGB2, CD18, ITGB7, TNFR2, TRANCE/RANKL, DNAM1 (CD226), SLAMF4 (CD244, 2B4), CD84, CD96 (Tactile), CEACAMI, CRTAM, Ly9 (CD229), PSGL1, CD100 (SEMA4D), CD69, SLAMF6 (NTB-A, Ly108), SLAM (CD150, IPO-3), BLAME (SLAMF8), SELPLG (CD162), LTBR, GADS, PAG/Cbp, NKp44, NKp30, or NKp46.

[0376] Intracellular signaling component sequences that act in a stimulatory manner may include iTAMs. Examples of iTAMs including primary cytoplasmic signaling sequences include those derived from CD3γ, CD3δ, CD3ε, CD3ζ, CD5, CD22, CD66d, CD79a, CD79b, and common FcRγ (FCER1G), FcγRIIa, FcRβ (Fcε Rib), DAP10, and DAP12. In particular embodiments, variants of CD3 retain at least one, two, three, or all ITAM regions.

[0377] In particular embodiments, an effector domain includes a cytoplasmic portion that associates with a cytoplasmic signaling protein, wherein the cytoplasmic signaling protein is a lymphocyte receptor or signaling domain thereof, a protein including a plurality of ITAMs, a co-stimulatory domain, or any combination thereof.

[0378] Additional examples of intracellular signaling components include the cytoplasmic sequences of the CD3ζ chain, and/or co-receptors that act in concert to initiate signal transduction following binding domain engagement.

[0379] A co-stimulatory domain is domain whose activation can be required for an efficient lymphocyte response to cellular marker binding. Some molecules are interchangeable as intracellular signaling components or co-stimulatory domains. Examples of costimulatory domains include CD27, CD28, 4-1BB (CD 137), OX40, CD30, CD40, PD-1, ICOS, lymphocyte function-associated antigen-1 (LFA-1), CD2, CD7, LIGHT, NKG2C, B7-H3, and a ligand that specifically binds with CD83. For example, CD27 co-stimulation has been demonstrated to enhance expansion, effector function, and survival of human CART cells in vitro and augments human T cell persistence and anti-cancer activity in vivo (Song et al. Blood. 2012; 119(3):696-706). Further examples of such co-stimulatory domain molecules include CD5, ICAM-1, GITR, BAFFR, HVEM (LIGHTR), SLAMF7, NKp80 (KLRF1), NKp44, NKp30, NKp46, CD160, CD19, CD4, CD8a, CD8β, IL2Rβ, IL2Rγ, IL7Rα, ITGA4, VLA1, CD49a, ITGA4, IA4, CD49D, ITGA6, VLA-6, CD49f, ITGAD, CDlld, ITGAE, CD103, ITGAL, CDlla, ITGAM, CDI Ib, ITGAX, CDllc, ITGBI, CD29, ITGB2, CD18, ITGB7, TNFR2, TRANCE/RANKL, DNAM1 (CD226), SLAMF4 (CD244, 2B4), CD84, CD96 (Tactile), NKG2D, CEACAMI, CRTAM, Ly9 (CD229), PSGL1, CD100 (SEMA4D), CD69, SLAMF6 (NTB-A, Lyl08), SLAM (SLAMFI, CD150, IPO-3), BLAME (SLAMF8), SELPLG (CD162), LTBR, LAT, GADS, SLP-76, PAG/Cbp, and CD19a.

[0380] In particular embodiments, the amino acid sequence of the intracellular signaling component includes a variant of CD3 and a portion of the 4-1 BB intracellular signaling component.

[0381] In particular embodiments, the intracellular signaling component includes (i) all or a portion of the signaling domain of CD3, (ii) all or a portion of the signaling domain of 4-1BB, or (iii) all or a portion of the signaling domain of CD3 and 4-1BB.

[0382] Intracellular components may also include one or more of a protein of a Wnt signaling pathway (e.g., LRP, Ryk, or ROR2), NOTCH signaling pathway (e.g., NOTCHI, NOTCH2, NOTCH3, or NOTCH4), Hedgehog signaling pathway (e.g., PTCH or SMO), receptor tyrosine kinases (RTKs) (e.g., epidermal growth factor (EGF) receptor family, fibroblast growth factor (FGF) receptor family, hepatocyte growth factor (HGF) receptor family, insulin receptor (IR) family, platelet-derived growth factor (PDGF) receptor family, vascular endothelial growth factor (VEGF) receptor family, tropomycin receptor kinase (Trk) receptor family, ephrin (Eph) receptor family, AXL receptor family, leukocyte tyrosine kinase (LTK) receptor family, tyrosine kinase with immunoglobulin-like and EGF-like domains 1 (TIE) receptor family, receptor tyrosine kinase-like orphan (ROR) receptor family, discoidin domain (DDR) receptor family, rearranged during transfection (RET) receptor family, tyrosine-protein kinase-like (PTK7) receptor family, related to receptor tyrosine kinase (RYK) receptor family, or muscle specific kinase (MuSK) receptor family); G-protein-coupled receptors, GPCRs (Frizzled or Smoothened); serine/threonine kinase receptors (BMPR or TGFR); or cytokine receptors (IL1R, IL2R, IL7R, or IL15R).

[0383] (c) Linkers. As used herein, a linker can be any portion of a CAR molecule that serves to connect two other subcomponents of the molecule. Some linkers serve no purpose other than to link other components while many linkers serve an additional purpose. Linkers in the context of linking VL and VH of antibody derived binding domains of scFv are described above. Linkers can also include spacer regions, and junction amino acids.

[0384] Spacer regions are a type of linker region that are used to create appropriate distances and/or flexibility from other linked components. In particular embodiments, the length of a spacer region can be customized for individual cellular markers on unwanted cells to optimize unwanted cell recognition and destruction. The spacer can be of a length that provides for increased responsiveness of the cell following antigen binding, as compared to in the absence of the spacer. In particular embodiments, a spacer region length can be selected based upon the location of a cellular marker epitope, affinity of a binding domain for the epitope, and/or the ability of the modified cells expressing the molecule to proliferate in vitro and/or in vivo in response to cellular marker recognition. Spacer regions can also allow for high expression levels in modified cells.

[0385] Exemplary spacers include those having 10 to 250 amino acids, 10 to 200 amino acids, 10 to 150 amino acids, 10 to 100 amino acids, 10 to 50 amino acids, or 10 to 25 amino acids. In particular embodiments, a spacer region is 12 amino acids, 20 amino acids, 21 amino acids, 26 amino acids, 27 amino acids, 45 amino acids, or 50 amino acids.

[0386] In particular embodiments, the spacer region is selected from the group including all or a portion of a hinge region sequence from IgG1, IgG2, IgG3, IgG4 or IgD alone or in combination with all or a portion of a CH2 region; all or a portion of a CH3 region; or all or a portion of a CH2 region and all or a portion of a CH3 region.

[0387] Exemplary spacers include IgG4 hinge alone, IgG4 hinge linked to CH2 and CH3 domains, or IgG4 hinge linked to the CH3 domain. In particular embodiments, the spacer includes an IgG4 linker of the amino acid sequence SEQ ID NO: 181. Hinge regions can be modified to avoid undesirable structural interactions such as dimerization with unintended partners.

[0388] In particular embodiments, a spacer region includes a hinge region that a type II C-lectin interdomain (stalk) region or a cluster of differentiation (CD) molecule stalk region. As used herein, a “wild type immunoglobulin hinge region” refers to a naturally occurring upper and middle hinge amino acid sequences interposed between and connecting the CHI and CH2 domains (for IgG, IgA, and IgD) or interposed between and connecting the CHI and CH3 domains (for IgE and IgM) found in the heavy chain of an antibody.

[0389] A “stalk region” of a type II C-lectin or CD molecule refers to the portion of the extracellular domain of the type II C-lectin or CD molecule that is located between the C-type lectin-like domain (CTLD; e.g., similar to CTLD of natural killer cell receptors) and the hydrophobic portion (transmembrane domain). For example, the extracellular domain of human CD94 (GenBank Accession No. AAC50291.1) corresponds to amino acid residues 34-179, but the CTLD corresponds to amino acid residues 61-176, so the stalk region of the human CD94 molecule includes amino acid residues 34-60, which are located between the hydrophobic portion (transmembrane domain) and CTLD (see Boyington et al, Immunity 10:15, 1999; for descriptions of other stalk regions, see also Beavil et al, Proc. Nat'l. Acad. Sci. USA 89:153, 1992; and Figdor et al, Nat. Rev. Immunol. 2:11, 2002). These type II C-lectin or CD molecules may also have junction amino acids (described below) between the stalk region and the transmembrane region or the CTLD. In another example, the 233 amino acid human NKG2A protein (GenBank Accession No. P26715.1) has a hydrophobic portion (transmembrane domain) ranging from amino acids 71-93 and an extracellular domain ranging from amino acids 94-233. The CTLD includes amino acids 119-231 and the stalk region includes amino acids 99-116, which may be flanked by additional junction amino acids. Other type II C-lectin or CD molecules, as well as their extracellular ligand-binding domains, stalk regions, and CTLDs are known in the art (see, e.g., GenBank Accession Nos. NP 001993.2; AAH07037.1; NP 001773.1; AAL65234.1; CAA04925.1; for the sequences of human CD23, CD69, CD72, NKG2A, and NKG2D and their descriptions, respectively).

[0390] Exemplary spacers also include those described in Hudecek et al. (Clin. Cancer Res., 19:3153, 2013) or WO2014/031687. In particular embodiments, the spacer region can be a CD28 linker of the amino acid sequence SEQ ID NO: 182. In particular embodiments, the spacer region is SEQ ID NO: 183. In particular embodiments, the spacer region is SEQ ID NO: 184.

[0391] In particular embodiments, a long spacer is greater than 119 amino acids (e.g., 229 amino acids) an intermediate spacer is 13-119 amino acids, and a short spacer is 12 amino acids or less. An example of an intermediate spacer region includes all or a portion of a IgG4 hinge region sequence and a CH3 region. An example of a long spacer includes all or a portion of a IgG4 hinge region sequence, a CH2 region, and a CH3 region. In particular embodiments of the present disclosure, short spacer sequences are preferred.

[0392] As further description regarding spacer regions, an extracellular component of a fusion protein optionally includes an extracellular, non-signaling spacer or linker region, which, for example, can position the binding domain away from the host cell (e.g., T cell) surface to enable proper cell/cell contact, antigen binding and activation (Patel et al., Gene Therapy 6: 412-419 (1999)). As indicated, an extracellular spacer region of a fusion binding protein is generally located between a hydrophobic portion or transmembrane domain and the extracellular binding domain, and the spacer region length may be varied to maximize antigen recognition (e.g., tumor recognition) based on the selected target molecule, selected binding epitope, or antigen-binding domain size and affinity (see, e.g., Guest et al., J. Immunother. 28:203-11, 2005; WO 2014/031687). In certain embodiments, a spacer region includes an immunoglobulin hinge region. An immunoglobulin hinge region may be a wild-type immunoglobulin hinge region or an altered wild-type immunoglobulin hinge region. In certain embodiments, an immunoglobulin hinge region is a human immunoglobulin hinge region. An immunoglobulin hinge region may be an IgG, IgA, IgD, IgE, or IgM hinge region. An IgG hinge region may be an IgG1, IgG2, IgG3, or IgG4 hinge region. An exemplary altered IgG4 hinge region is described in PCT Publication No. WO 2014/031687. Other examples of hinge regions used in the fusion binding proteins described herein include the hinge region present in the extracellular regions of type 1 membrane proteins, such as CD8a, CD4, CD28 and CD7, which may be wild-type or variants thereof.

[0393] In certain embodiments, an extracellular spacer region includes all ora portion of an Fc domain selected from: a CHI domain, a CH2 domain, a CH3 domain, a CH4 domain, or any combination thereof (see, e.g., WO 2014/031687). The Fc domain or portion thereof may be wildtype of altered (e.g., to reduce antibody effector function). In certain embodiments, the extracellular component includes an immunoglobulin hinge region, a CH2 domain, a CH3 domain, or any combination thereof disposed between the binding domain and the hydrophobic portion. In certain embodiments, the extracellular component includes an IgG1 hinge region, an IgG1 CH2 domain, and an IgG1 CH3 domain. In further embodiments, the IgG1 CH2 domain includes (i) a N297Q mutation, (ii) substitution of the first six amino acids (APEFLG) with APPVA, or both of (i) and (ii). In certain embodiments, the immunoglobulin hinge region, Fc domain or portion thereof, or both are human.

[0394] (d) Transmembrane Domains. As indicated, transmembrane domains within a CAR molecule, often serving to connect the extracellular component and intracellular component through the cell membrane. The transmembrane domain can anchor the expressed molecule in the modified cell's membrane.

[0395] The transmembrane domain can be derived either from a natural and/or a synthetic source. When the source is natural, the transmembrane domain can be derived from any membrane-bound or transmembrane protein. Transmembrane domains can include at least the transmembrane region(s) of the α, β or ζ chain of a T-cell receptor, CD28, CD27, CD3 epsilon, CD45, CD4, CD5, CD8, CD9, CD16, CD22; CD33, CD37, CD64, CD80, CD86, CD134, CD137 and CD154. In particular embodiments, a transmembrane domain may include at least the transmembrane region(s) of, e.g., KIRDS2, OX40, CD2, CD27, LFA-1 (CD 11a, CD18), ICOS (CD278), 4-IBB (CD137), GITR, CD40, BAFFR, HVEM (LIGHTR), SLAMF7, NKp80 (KLRF1), NKp44, NKp30, NKp46, CD160, CD19, IL2Rβ, IL2Rγ, IL7R a, ITGA1, VLA1, CD49a, ITGA4, IA4, CD49D, ITGA6, VLA-6, CD49f, ITGAD, CDI Id, ITGAE, CD103, ITGAL, CDIIa, ITGAM, CDI Ib, ITGAX, CDI Ic, ITGB1, CD29, ITGB2, CD18, ITGB7, TNFR2, DNAM1(CD226), SLAMF4 (CD244, 2B4), CD84, CD96 (Tactile), CEACAMI, CRT AM, Ly9(CD229), PSGL1, CD100 (SEMA4D), SLAMF6 (NTB-A, Lyl08), SLAM (SLAMFI, CD150, IPO-3), BLAME (SLAMF8), SELPLG (CD162), LTBR, PAG/Cbp, NKG2D, or NKG2C. In particular embodiments, a variety of human hinges can be employed as well including the human Ig (immunoglobulin) hinge (e.g., an IgG4 hinge, an IgD hinge), a GS linker (e.g., a GS linker described herein), a KIR2DS2 hinge or a CD8a hinge.

[0396] In particular embodiments, a transmembrane domain has a three-dimensional structure that is thermodynamically stable in a cell membrane, and generally ranges in length from 15 to 30 amino acids. The structure of a transmembrane domain can include an α helix, a β barrel, a β sheet, a β helix, or any combination thereof.

[0397] A transmembrane domain can include one or more additional amino acids adjacent to the transmembrane region, e.g., one or more amino acid within the extracellular region of the CAR (e.g., up to 15 amino acids of the extracellular region) and/or one or more additional amino acids within the intracellular region of the CAR (e.g., up to 15 amino acids of the intracellular components). In one aspect, the transmembrane domain is from the same protein that the signaling domain, co-stimulatory domain or the hinge domain is derived from. In another aspect, the transmembrane domain is not derived from the same protein that any other domain of the CAR is derived from. In some instances, the transmembrane domain can be selected or modified by amino acid substitution to avoid binding of such domains to the transmembrane domains of the same or different surface membrane proteins to minimize interactions with other unintended members of the receptor complex. In one aspect, the transmembrane domain is capable of homodimerization with another CAR on the cell surface of a CAR-expressing cell. In a different aspect, the amino acid sequence of the transmembrane domain may be modified or substituted so as to minimize interactions with the binding domains of the native binding partner present in the same CAR-expressing cell. In particular embodiments, the transmembrane domain includes the amino acid sequence of the CD28 transmembrane domain.

[0398] (e) Junction Amino Acids. Junction amino acids can be a linker which can be used to connect the sequences of CAR domains when the distance provided by a spacer is not needed and/or wanted. Junction amino acids are short amino acid sequences that can be used to connect co-stimulatory intracellular signaling components. In particular embodiments, junction amino acids are 9 amino acids or less.

[0399] Junction amino acids can be a short oligo- or protein linker, preferably between 2 and 9 amino acids (e.g., 2, 3, 4, 5, 6, 7, 8, or 9 amino acids) in length to form the linker. In particular embodiments, a glycine-serine doublet can be used as a suitable junction amino acid linker. In particular embodiments, a single amino acid, e.g., an alanine, a glycine, can be used as a suitable junction amino acid.

[0400] (f) Control Features Including Tag Cassettes, Transduction Markers, and Suicide Switches. In particular embodiments, CAR constructs can include one or more tag cassettes, transduction markers, and/or suicide switches. In some embodiments, the transduction marker and/or suicide switch is within the same construct but is expressed as a separate molecule on the cell surface. Tag cassettes and transduction markers can be used to activate, promote proliferation of, detect, enrich for, isolate, track, deplete and/or eliminate genetically modified cells in vitro, in vivo and/or ex vivo. “Tag cassette” refers to a unique synthetic peptide sequence affixed to, fused to, or that is part of a CAR, to which a cognate binding molecule (e.g., ligand, antibody, or other binding partner) is capable of specifically binding where the binding property can be used to activate, promote proliferation of, detect, enrich for, isolate, track, deplete and/or eliminate the tagged protein and/or cells expressing the tagged protein. Transduction markers can serve the same purposes but are derived from naturally occurring molecules and are often expressed using a skipping element that separates the transduction marker from the rest of the CAR molecule.

[0401] Tag cassettes that bind cognate binding molecules include, for example, His tag, Flag tag, Xpress tag, Avi tag, Calmodulin tag, Polyglutamate tag, HA tag, Myc tag, Softag 1, Softag 3, and V5 tag. In particular embodiments, a CAR includes a Myc tag.

[0402] Conjugate binding molecules that specifically bind tag cassette sequences disclosed herein are commercially available. For example, His tag antibodies are commercially available from suppliers including Life Technologies, Pierce Antibodies, and GenScript. Flag tag antibodies are commercially available from suppliers including Pierce Antibodies, GenScript, and Sigma-Aldrich. Xpress tag antibodies are commercially available from suppliers including Pierce Antibodies, Life Technologies and GenScript. Avi tag antibodies are commercially available from suppliers including Pierce Antibodies, IsBio, and Genecopoeia. Calmodulin tag antibodies are commercially available from suppliers including Santa Cruz Biotechnology, Abcam, and Pierce Antibodies. HA tag antibodies are commercially available from suppliers including Pierce Antibodies, Cell Signal and Abcam. Myc tag antibodies are commercially available from suppliers including Santa Cruz Biotechnology, Abcam, and Cell Signal.

[0403] Transduction markers may be selected from at least one of a truncated CD19 (tCD19; see Budde et al., Blood 122: 1660, 2013); a truncated human EGFR (tEGFR; see Wang et al., Blood 118: 1255, 2011); an extracellular domain of human CD34; and/or RQR8 which combines target epitopes from CD34 (see Fehse et al., Mol. Therapy 1(5 Pt 1); 448-456, 2000) and CD20 antigens (see Philip et al., Blood 124: 1277-1278, 2014).

[0404] In particular embodiments, a polynucleotide encoding an iCaspase9 construct (iCasp9) may be inserted into a CAR nucleotide construct as a suicide switch.

[0405] Control features may be present in multiple copies in a CAR or can be expressed as distinct molecules with the use of a skipping element. For example, a CAR can have one, two, three, four or five tag cassettes and/or one, two, three, four, or five transduction markers could also be expressed. For example, embodiments can include a CAR construct having two Myc tag cassettes, or a His tag and an HA tag cassette, or a HA tag and a Softag 1 tag cassette, or a Myc tag and a SBP tag cassette. In particular embodiments, CAR that will multimerize following expression include different tag cassettes. In particular embodiments, a transduction marker includes tEFGR. Exemplary transduction markers and cognate pairs are described in U.S. Ser. No. 13/463,247.

[0406] One advantage of including at least one control feature in a CAR is that CAR expressing cells administered to a subject can be depleted using the cognate binding molecule to a tag cassette. In certain embodiments, the present disclosure provides a method for depleting a modified cell expressing a CAR by using an antibody specific for the tag cassette, using an cognate binding molecule specific for the control feature, or by using a second modified cell expressing a CAR and having specificity for the control feature. Elimination of modified cells may be accomplished using depletion agents specific for a control feature.

[0407] In certain embodiments, modified cells expressing a chimeric molecule may be detected or tracked in vivo by using antibodies that bind with specificity to a control feature (e.g., anti-Tag antibodies), or by other cognate binding molecules that specifically bind the control feature, which binding partners for the control feature are conjugated to a fluorescent dye, radio-tracer, iron-oxide nanoparticle or other imaging agent known in the art for detection by X-ray, CT-scan, MRI-scan, PET-scan, ultrasound, flow-cytometry, near infrared imaging systems, or other imaging modalities (see, e.g., Yu, et al., Theranostics 2:3, 2012).

[0408] Thus, modified cells expressing at least one control feature with a CAR can be, e.g., more readily identified, isolated, sorted, induced to proliferate, tracked, and/or eliminated as compared to a modified cell without a tag cassette.

[0409] Exemplary CARs and CAR architectures useful in the methods and compositions of the present disclosure include those provided by WO2012/138475A1, U.S. Pat. No. 9,624,306B2, U.S. Pat. No. 9,266,960B2, US2017/017477, EP2694549B1, US2017/0283504, US2017/0281766, US20170283500, US2018/0086846, US2010/0105136, US2010/0105136, WO2012/079000, WO2008045437, WO2016/139487A1, and WO2014/039523.

[0410] TCR refer to naturally occurring T cell receptors. HSC can be modified in vivo to express a selected TCR. CAR/TCR hybrids refer to proteins having an element of a TCR and an element of a CAR. For example, a CAR/TCR hybrid could have a naturally occurring TCR binding domain with an effector domain that the TCR binding domain is not naturally associated with. A CAR/TCR hybrid could have a mutated TCR binding domain and an ITAM signaling domain. A CAR/TCR hybrid could have a naturally occurring TCR with an inserted non-naturally occurring spacer region or transmembrane domain.

[0411] Particular CAR/TCR hybrids include TRuC® (T Cell Receptor Fusion Construct) hybrids; TCR2 Therapeutics, Cambridge, Mass. By way of example, the production of TCR fusion proteins is described in International Patent Publications WO 2018/026953 and WO 2018/067993, and in Application Publication US 2017/0166622.

[0412] In particular embodiments, CAR/TCR hybrids include a “T-cell receptor (TCR) fusion protein” or “TFP”. A TFP includes a recombinant polypeptide derived from the various polypeptides including the TCR that is generally capable of i) binding to a surface antigen on target cells and ii) interacting with other polypeptide components of the intact TCR complex, typically when co-located in or on the surface of a T-cell.

[0413] In particular embodiments, a TFP includes an antibody fragment that binds a cancer antigen (e.g., CD19, ROR1) wherein the sequence of the antibody fragment is contiguous with and in the same reading frame as a nucleic acid sequence encoding a TCR subunit or portion thereof. The TFPs are able to associate with one or more endogenous (or alternatively, one or more exogenous, or a combination of endogenous and exogenous) TCR subunits in order to form a functional TCR complex.

### I(C)(i)(b). Gene Editing Systems and Components

[0414] In various embodiments, a payload of the present disclosure encodes at least one component, or all components, of a gene editing system. Gene editing systems of the present disclosure include CRISPR systems and base editing systems. Broadly, gene editing systems can include a plurality of components including a gene editing enzyme selected from a CRISPR-associated RNA-guided endonuclease and a base editing enzyme and at least one gRNA. Accordingly, gene editing systems of the present disclosure can include either (i) in the case of a CRISPR system, a CRISPR enzyme that is a CRISPR-associated RNA-guided endonuclease and at least one guide RNA (gRNA), or (ii) in the case of a base editing system, a base editing enzyme and at least one gRNA.

[0415] The present disclosure includes that self-inactivating gene editing systems include gene editing systems that are present in a vector of the present disclosure and are rendered non-functional upon excision and/or integration into a host cell genome of a portion of the vector, e.g., an integration element. In various embodiments, the gene editing system is rendered non-functional by degradation of the vector sequence encoding at least one component of the gene editing system following excision of the integration element and/or integration of the integration element into a host cell genome.

[0416] The present disclosure includes, in various embodiments, a nucleic acid sequence encoding a gene editing system in which a CRISPR enzyme or base editing enzyme is operably linked with a PGK promoter. The present disclosure includes the experimental discovery that PGK is a weaker promoter in producer cells such as HEK293 cells for donor vector production (i.e., drives relatively low or reduced levels of coding sequence expression, e.g., as compared to an Ef1α promoter in a producer cell and/or as compared to a PGK promoter in an HSC) but drives efficient transgene expression in HSCs (i.e., drives relatively high or increased levels of coding sequence expression, e.g., as compared to an Ef1α promoter in an HSC and/or as compared to a PGK promoter in a producer cell such as a HEK293 cell).

[0417] In various embodiments, a nucleic acid sequence encoding a gene editing system that includes a CRISPR enzyme or base editing enzyme includes a microRNA target site that reduces or suppresses expression of the enzyme in producer cells such as HEK293 cells, e.g., to avoid or reduce potential adverse effects of gene editing system expression (e.g., base editing system expression) in the producer cell(s), e.g., from expression of TadA and/or Tad*. In various embodiments, a miR sequence can be a sequence that suppresses base editing or CRISPR enzyme expression in a producer cell during HDAd35 donor vector production, e.g., as described in Saydaminova et al., Mol. Ther. Meth. Clin. Dev. 1: 14057, 2015; Li et al., Mol. Ther. Meth. Clin. Dev. 9: 390-401, 2018, which are herein incorporated by reference.

[0418] For the avoidance of doubt, the present disclosure therefore includes embodiments in which a nucleic acid sequence encoding a gene editing system can include any or all of (i) a nucleic acid sequence encoding a CRISPR enzyme or base editing enzyme, optionally where the nucleic acid sequence includes a modified TadA and/or TadA* as disclosed herein; (ii) a PGK promoter operably linked to the CRISPR enzyme or base editing enzyme coding sequence; and (iii) a microRNA target site that reduces or suppresses expression of the enzyme in producer cells such as HEK293 cells. The present disclosure includes that these features (i, ii, and iii) can contribute to effective gene therapy individually and in synergistic combination.

### I(C)(i)(b)(1). CRISPR Payload Expression Products

[0419] The CRISPR (Clustered Regularly Interspaced Short Palindromic Repeats)/Cas (CRISPR-associated protein) nuclease system is an engineered nuclease system used for genetic engineering that is based on a bacterial system. It is based in part on the adaptive immune response of many bacteria and archaea. When a virus or plasmid invades a bacterium, segments of the invaders DNA are converted into CRISPR RNAs (crRNA) by the bacteria's “immune” response. The crRNA then associates, through a region of partial complementarity, with another type of RNA called tracrRNA to guide a Cas nuclease to a region homologous to the crRNA in the target DNA called a “protospacer.” The Cas nuclease cleaves the DNA to generate blunt ends at the double-strand break at sites specified by a 20-nucleotide complementary strand sequence contained within the crRNA transcript. In some instances, the Cas nuclease requires both the crRNA and the tracrRNA for site-specific DNA recognition and cleavage.

[0420] Guide RNA (gRNA) is one example of a targeting element. In its simplest form, gRNA provides a sequence that targets a site within a genome based on complementarity (e.g., crRNA). As explained below, however, gRNA can also include additional components. For example, in particular embodiments, gRNA can include a targeting sequence (e.g., crRNA) and a component to link the targeting sequence to a cutting element. This linking component can be tracrRNA. In particular embodiments, as described below, gRNA including crRNA and tracrRNA can be expressed as a single molecule referred to as single gRNA (sgRNA). gRNA can also be linked to a cutting element through other mechanisms such as through a nanoparticle or through expression or construction of a dual or multi-purpose molecule. Those of skill in the art will appreciate that gRNA or other targeting elements to generate a selected nucleic acid sequence correction or modification, e.g., in a host cell of an adenoviral donor vector or genome of the present disclosure, can be readily designed and implemented, e.g., based on available sequence information.

[0421] In particular embodiments, targeting elements (e.g., gRNA) can include one or more modifications (e.g., a base modification, a backbone modification), to provide the nucleic acid with a new or enhanced feature (e.g., improved stability). Modified backbones may include those that retain a phosphorus atom in the backbone and those that do not have a phosphorus atom in the backbone. Suitable modified backbones containing a phosphorus atom may include, for example, phosphorothioates, chiral phosphorothioates, phosphorodithioates, phosphotriesters, aminoalkylphosphotriesters, methyl and other alkyl phosphonates such as 3′-alkylene phosphonates, 5′-alkylene phosphonates, chiral phosphonates, phosphinates, phosphoramidates including 3′-amino phosphoramidate and aminoalkylphosphoramidates, phosphorodiamidates, thionophosphoramidates, thionoalkylphosphonates, thionoalkylphosphotriesters, selenophosphates, and boranophosphates having normal 3′-5′ linkages, 2′-5′ linked analogs, and those having inverted polarity wherein one or more internucleotide linkages is a 3′ to 3′, a 5′ to 5′ or a 2′ to 2′ linkage. Suitable targeting elements having inverted polarity can include a single 3′ to 3′ linkage at the 3′-most internucleotide linkage (i.e. a single inverted nucleoside residue in which the nucleobase is missing or has a hydroxyl group in place thereof). Various salts (e.g., potassium chloride or sodium chloride), mixed salts, and free acid forms can also be included.

[0422] Targeting elements can include one or more phosphorothioate and/or heteroatom internucleoside linkages, in particular —CH₂—NH—O—CH₂—, —CH₂—N(CH₃)—O—CH₂— (i.e. a methylene (methylimino) or MMI backbone), —CH₂—O—N(CH₃)—CH₂—, —CH₂—N(CH₃)—N(CH₃)—CH₂— and —O—N(CH₃)—CH₂—CH₂— (wherein the native phosphodiester internucleotide linkage is represented as —O—P(═O)(OH)—O—CH₂—).

[0423] In particular embodiments, targeting elements can include a morpholino backbone structure. For example, the targeting elements can include a 6-membered morpholino ring in place of a ribose ring. In some of these embodiments, a phosphorodiamidate or other non-phosphodiester internucleoside linkage replaces a phosphodiester linkage.

[0424] In particular embodiments, targeting elements can include one or more substituted sugar moieties. Suitable polynucleotides can include a sugar substituent group selected from: OH; F; O-, S-, or N-alkyl; O-, S-, or N-alkenyl; O-, S- or N-alkynyl; or O-alkyl-O-alkyl, wherein the alkyl, alkenyl and alkynyl may be substituted or unsubstituted C1 to C10 alkyl or C2 to C10 alkenyl and alkynyl. Particularly suitable are O((CH₂)nO) mCH₃, O(CH₂)nOCH₃, O(CH₂)nNH₂, O(CH₂)nCH₃, O(CH₂)nONH₂, and O(CH₂)nON((CH₂)nCH₃)₂, where n and m are from 1 to 10.

[0425] Examples of cutting elements include nucleases. CRISPR-Cas loci have more than 50 gene families and there are no strictly universal genes, indicating fast evolution and extreme diversity of loci architecture. Exemplary Cas nucleases include Casl, CasIB, Cas2, Cas3, Cas4, Cas5, Cas6, Cas7, Cas8, Cas9 (also known as Csn1 and Csx12), CasIO, Cpfl, C2c3, C2c2 and C2clCsyl, Csy2, Csy3, Csel, Cse2, Cscl, Csc2, Csa5, Csn2, Csm2, Csm3, Csm4, Csm5, Csm6, Cmr1, Cmr3, Cmr4, Cmr5, Cmr6, Cpfl, Csbl, Csb2, Csb3, Csxl7, Csxl4, Csxl0, Csxl6, CsaX, Csx3, Csxl, Csxl5, Csf1, Csf2, Csf3, and Csf4.

[0426] There are three main types of Cas nucleases (type I, type II, and type III), and 10 subtypes including 5 type I, 3 type II, and 2 type III proteins (see, e.g., Hochstrasser and Doudna, Trends Biochem Sci, 2015:40W:58-66). Type II Cas nucleases include Casl, Cas2, Csn2, and Cas9. These Cas nucleases are known to those skilled in the art. For example, the amino acid sequence of the Streptococcus pyogenes wild-type Cas9 polypeptide is set forth, e.g., in NCBI Ref. Seq. No. NP 269215, and the amino acid sequence of Streptococcus thermophilus wild-type Cas9 polypeptide is set forth, e.g., in NCBI Ref. Seq. No. WP_011681470.

[0427] In particular embodiments, Cas9 refers to an RNA-guided double-stranded DNA-binding nuclease protein or nickase protein. Wild-type Cas9 nuclease has two functional domains, e.g., RuvC and HNH, that cut different DNA strands. Cas9 can induce double-strand breaks in genomic DNA (target DNA) when both functional domains are active. The Cas9 enzyme, in some embodiments, includes one or more catalytic domains of a Cas9 protein derived from bacteria such as Corynebacter, Sutterella, Legionella, Treponema, Filif actor, Eubacterium, Streptococcus, Lactobacillus, Mycoplasma, Bacteroides, Flaviivola, Flavobacterium, Sphaerochaeta, Azospirillum, Gluconacetobacter, Neisseria, Roseburia, Parvibaculum, Staphylococcus, Nitratifractor, and Campylobacter. In some embodiments, the Cas9 is a fusion protein, e.g. the two catalytic domains are derived from different bacterial species.

[0428] As indicated previously, the CRISPR/Cas system has been engineered such that, in certain cases, crRNA and tracrRNA can be combined into one molecule called a single gRNA (sgRNA). In this engineered approach, the sgRNA guides Cas to target any desired sequence (see, e.g., Jinek et al., Science 337:816-821, 2012; Jinek et al., eLife 2:e00471, 2013; Segal, eLife 2:e00563, 2013). Thus, the CRISPR/Cas system can be engineered to create a double-strand break at a desired target in a genome of a cell, and harness the cell's endogenous mechanisms to repair the induced break by HDR, or NHEJ. Particular embodiments described herein utilize homology arms to promote HDR at defined integration sites.

[0429] Useful variants of the Cas9 nuclease include a single inactive catalytic domain, such as a RuvC″ or HNH″ enzyme or a nickase. A Cas9 nickase has only one active functional domain and, in some embodiments, cuts only one strand of the target DNA, thereby creating a single strand break or nick. In some embodiments, the mutant Cas9 nuclease having at least a D10A mutation is a Cas9 nickase. In other embodiments, the mutant Cas9 nuclease having at least a H840A mutation is a Cas9 nickase. Other examples of mutations present in a Cas9 nickase include N854A and N863 A. A double-strand break is introduced using a Cas9 nickase if at least two DNA-targeting RNAs that target opposite DNA strands are used. A double-nicked induced double-strand break is repaired by HDR or NHEJ. This gene editing strategy generally favors HDR and decreases the frequency of indel mutations at off-target DNA sites. The Cas9 nuclease or nickase, in some embodiments, is codon-optimized for the target cell or target organism.

[0430] Particular embodiments can utilize Staphylococcus aureus Cas9 (SaCas9). Particular embodiments can utilize SaCas9 with mutations at one or more of the following positions: E782, N968, and/or R1015. Particular embodiments can utilize SaCas9 with mutations at one or more of the following positions: E735, E782, K929, N968, A1021, K1044 and/or R1015. In some embodiments, the variant SaCas9 protein includes one or more of the following mutations: R1015Q, R1015H, E782K, N968K, E735K, K929R, A1021T, and/or K1044N. In some embodiments, the variant SaCas9 protein includes mutations at D10A, D556A, H557A, N580A, e.g., D10A/H557A and/or D10A/D556A/H557A/N580A. In some embodiments, the variant SaCas9 protein includes one or more mutations selected from E735, E782, K929, N968, R1015, A1021, and/or K1044. In some embodiments, the SaCas9 variants can include one of the following sets of mutations: E782K/N968K/R1015H (KKH variant); E782K/K929R/R1015H (KRH variant); or E782K/K929R/N968K/R1015H (KRKH variant).

[0431] A Class II, Type V CRISPR-Cas class exemplified by Cpf1 has been identified Zetsche et al. (2015) Cell 163(3): 759-771. The Cpf1 nuclease particularly can provide added flexibility in target site selection by means of a short, three base pair recognition sequence (TTN), known as the protospacer-adjacent motif or PAM. Cpf1's cut site is at least 18 bp away from the PAM sequence. Moreover, staggered DSBs with sticky ends permit orientation-specific donor template insertion, which is advantageous in non-dividing cells.

[0432] Particular embodiments can utilize engineered Cpfls. For example, US 2018/0030425 describes engineered Cpf1 nucleases from Lachnospiraceae bacterium ND2006 and Acidaminococcus sp. BV3L6 with altered and improved target specificity. Particular variants include Lachnospiraceae bacterium ND2006, e.g., at least including amino acids 19-1246 with mutations (i.e., replacement of the native amino acid with a different amino acid, e.g., alanine, glycine, or serine), at one or more of the following positions: S202, N274, N278, K290, K367, K532, K609, K915, Q962, K963, K966, K1002, and/or S1003. Particular Cpf1 variants can also include Acidaminococcus sp. BV3L6 Cpf1 (AsCpf1) with mutations (i.e., replacement of the native amino acid with a different amino acid, e.g., alanine, glycine, or serine (except where the native amino acid is serine)), at one or more of the following positions: N178, S186, N278, N282, R301, T315, S376, N515, K523, K524, K603, K965, Q1013, Q1014, and/or K1054.

[0433] Other Cpf1 variants include Cpf1 homologs and orthologs of the Cpf1 polypeptides disclosed in Zetsche et al. (2015) Cell 163: 759-771 as well as the Cpf1 polypeptides disclosed in U.S. 2016/0208243. Other engineered Cpf1 variants are known to those of ordinary skill in the art and included within the scope of the current disclosure (see, e.g., WO/2017/184768).

[0434] Additional information regarding CRISPR-Cas systems and components thereof are described in, U.S. Pat. Nos. 8,697,359, 8,771,945, 8,795,965, 8,865,406, 8,871,445, 8,889,356, 8,889,418, 8,895,308, 8,906,616, 8,932,814, 8,945,839, 8,993,233 and 8,999,641 and applications related thereto; and WO2014/018423, WO2014/093595, WO2014/093622, WO2014/093635, WO2014/093655, WO2014/093661, WO2014/093694, WO2014/093701, WO2014/093709, WO2014/093712, WO2014/093718, WO2014/145599, WO2014/204723, WO2014/204724, WO2014/204725, WO2014/204726, WO2014/204727, WO2014/204728, WO2014/204729, WO2015/065964, WO2015/089351, WO2015/089354, WO2015/089364, WO2015/089419, WO2015/089427, WO2015/089462, WO2015/089465, WO2015/089473 and WO2015/089486, WO2016/205711, WO2017/106657, WO2017/127807 and applications related thereto.

[0435] In some embodiments a CRISPR system is engineered to modify a nucleic acid sequence that encodes γ-globin, e.g., to increase expression of γ-globin. The main fetal form of hemoglobin, hemoglobin F (HbF) is formed by pairing of γ-globin polypeptide subunits with α-globin polypeptide subunits. Human fetal γ-globin genes (HBG1 and HBG2; two highly homologous genes produced by evolutionary duplication) are ordinarily silenced around birth, while expression of adult β-globin gene expression (HBB and HBD) increases. Mutations that cause or permit persistent expression of fetal γ-globin throughout life can ameliorate phenotypes of β-globin deficiencies. Thus, reactivation of fetal γ-globin genes can be therapeutically beneficially, particularly in subjects with β-globin deficiency. A variety of mutations that cause increased expression of γ-globin are known in the art or disclosed herein (see, e.g., Wienert, Trends in Genetics 34(12): 927-940,2018, which is incorporated herein by reference in its entirety and with respect to mutations that increase expression of γ-globin). Certain such mutations are found in the HBG1 promoter or HBG2 promoter.

[0436] In some embodiments, a vector or genome includes a CRISPR system in which a payload includes an integration element and at least one component of the CRISPR system is present in the payload but outside of the integration element (e.g., outside of the fragment of a payload including a transposable integration element that is flanked by the transposon inverted repeats or outside of the fragment of a payload that includes homology arms for homologous integration). In certain particular embodiments in which a payload includes a transposable integration element, where the transposable integration element is flanked by transposon inverted repeats, one or more of a CRISPR enzyme and/or one or more gRNAs of the CRISPR system are present in the payload at a position outside of (i.e., not present in) the transposable integration element (i.e., not present in the nucleic acid sequence flanked by the transposon inverted repeats). In certain particular embodiments in which a payload includes a transposable integration element, where the transposable integration element is flanked by homology arms, one or more of a CRISPR enzyme and/or one or more gRNAs of the CRISPR editing system are present in the payload at a position outside of (i.e., not present in) the integration element (i.e., not present in the nucleic acid sequence flanked by the homology arms). In such systems, expression and/or activity of the CRISPR system is transient, in that transposition of the transposable integration element can disrupt the vector and reduce or terminate expression of one or more of the CRISPR system components positioned outside of the transposable integration element. Such vectors that include CRISPR systems can sometimes be referred to as “self-inactivating” CRISPR systems or vectors because integration of the integration element (e.g., by transposition or homologous recombination) can inactivate expression and/or activity of the CRISPR system. In various embodiments, a self-inactivating CRISPR system is present in a combination payload.

[0437] The present inventors have observed that an adenoviral vector (e.g., an HDAd adenoviral vector) including a self-inactivating CRISPR system payload resulted in an increased cleavage frequency in gene therapy (e.g., in vivo gene therapy) and/or increased survival of transduced and/or edited target cells (e.g., increased survival of transduces HSPCs) as compared to other CRISPR system payloads, e.g., wherein a CRISPR system is fully within an integration element or in which the CRISPR system does not integrate into a host cell genome but expression is not inactivated by vector disruption. Self-inactivation of CRISPR systems shortens expression of the CRISPR enzyme and/or gRNAs, increases survival of edited cells, and increases the percentage of long-term repopulating cells, To provide one example, gene therapy using HDAd vectors including a combination payload including a self-inactivating CRISPR system for reactivation of HBG1 and/or HGB2 and further including a nucleic acid sequence for expression of γ-globin, produced significantly higher γ-globin in RBCs after transduction that did HDAd vectors including either a non-inactivating CRISPR system or nucleic acid sequence for expression of γ-globin alone.

[0438] Further provided herein are methods in which a donor vector including a self-inactivating CRISPR system is administered, e.g., to a human subject, in combination with a support vector or genome encoding a transposase for transposition of the integration element. The present disclosure includes that in various instances the donor vector is administered prior to administration of the support vector, wherein the time period between administration of the donor vector and administration of the support vector provides a means of regulating the duration and/or level of activity of the CRISPR system. For instance, in various embodiments, a support vector may be administered, e.g., to a subject, a period of time after administration of the donor vector where the period of time is at least 1, 2, 3, 4, 5, 6, 8, 10, 12, 14, 16, 18, 20, 22, 24, 30, 36, 42, 48, 54, 60, 66, or 72, 96, or 128 hours (e.g., wherein the period has a lower bound of 1, 2, 3, 4, 5, 6, 8, 10, 12, 14, 16, 18, 20, 22, 24, 30, 36, 42, 48, 54, 60, 66, or 72 hours and an upper bound of 6, 8, 10, 12, 14, 16, 18, 20, 22, 24, 30, 36, 42, 48, 54, 60, 66, 72, 96, or 128 hours).

[0439] In some embodiments, a nucleic acid sequence encoding a CRISPR system component (e.g., encoding a CRISPR enzyme) is engineered to include a microRNA target site for microRNA regulation of CRISPR expression and/or activity.

### I(C)(i)(b)(2). Base Editor Payload Expression Products

[0440] The present disclosure includes, among other things, base editing agents and nucleic acids encoding the same, optionally wherein a base editing agent or nucleic acid encoding the same is present in an vector or genome such as an adenoviral vector or genome. A base editing system can include a base editing enzyme and/or at least one gRNA as components thereof. In certain particular embodiments, a base editing agent and/or a base editing system of the present disclosure is present in an Ad35 or Ad5/35 adenoviral vector. However, those of skill in the art will appreciate that base editing agents of the present disclosure and nucleic acid sequences encoding the same can be present in any context or form, e.g., in a vector that is not an adenoviral vector, e.g., in a plasmid. Nucleotide sequences encoding base editing systems as disclosed herein are typically too large for inclusion in many limited-capacity vector systems, but the large capacity of adenoviral vectors permits inclusion of such sequences in adenoviral vectors and genomes of the present disclosure. Indeed, as discussed elsewhere herein, adenoviral vectors can include payloads that encode a base editing system and further encode one or more additional coding sequences. An additional advantage of adenoviral vectors and genomes as disclosed herein for gene therapy with payloads encoding base editors of the present disclosure is that adenoviral genomes such as Ad35 genomes do not naturally integrate into host cell genomes, which facilitates transient expression of base editing systems, which can be desirable, e.g., to avoid immunogenicity and/or genotoxicity.

[0441] Base editing refers to the selective modification of a nucleic acid sequence by converting a base or base pair within genomic DNA or cellular RNA to a different base or base pair (Rees & Liu, Nature Reviews Genetics, 19:770-788, 2018). There are two general classes of DNA base editors: (i) cytosine base editors (CBEs) that convert guanine-cytosine base pairs into thymine-adenine base pairs, and (ii) adenine base editors (ABEs) that convert adenine-thymine base pairs to guanine cytosine base pairs. In particular embodiments, components from the CRISPR system are combined with other enzymes or biologically active fragments thereof to directly install, cause, or generate mutations such as point mutations in nucleic acids, e.g., into DNA or RNA, e.g., without making, causing, or generating one or more double-stranded breaks in the mutated nucleic acid. Certain such combinations of components are known as base editors.

[0442] DNA base editors can include a catalytically disabled nuclease fused to a nucleobase deaminase enzyme and, in some cases, a DNA glycosylase inhibitor. RNA base editors achieve analogous changes using components that base modify RNA.

[0443] Upon binding to its target locus in DNA, base pairing between the guide RNA and target DNA strand leads to displacement of a small segment of single-stranded DNA. DNA bases within this single-stranded DNA bubble can be modified by the deaminase enzyme. In certain embodiments, to improve efficiency in eukaryotic cells, a catalytically disabled nuclease also generates a nick in the non-edited DNA strand, inducing cells to repair the non-edited strand using the edited strand as a template.

[0444] For CBEs, CRISPR-based editors can be produced by linking a cytosine deaminase with a Cas nickase, e.g., Cas9 nickase (nCas9). To provide one example, nCas9 can create a nick in target DNA by cutting a single strand, reducing the likelihood of detrimental indel formation as compared to methods that require a double-stranded break. After binding with DNA, the CBE deaminates a target cytosine (C) into a uracil (U) base. Later the resultant U-G pair is either repaired by cellular mismatch repair machinery making an original C-G pair converted to T-A or reverted to the original C-G by base excision repair mediated by uracil glycosylase. In various embodiments, expression of uracil glycosylase inhibitor (UGI), e.g., a UGI present in a payload, reduces the occurrence of the second outcome and increases the generation of T-A base pair formation.

[0445] For adenosine base editors (ABEs), exemplary adenosine deaminases that can act on DNA for adenine base editing include a mutant TadA adenosine deaminases (TadA*) that accepts DNA as its substrate. E. coli TadA typically acts as a homodimer to deaminate adenosine in transfer RNA (tRNA). TadA* deaminase catalyzes the conversion of a target ‘A’ to ‘I’ (inosine), which is treated as ‘G’ by cellular polymerases. Subsequently, an original genomic A-T base pair can be converted to a G-C pair. As the cellular inosine excision repair is not as active as uracil excision, ABE does not require any additional inhibitor protein like UGI in CBE. In some embodiments, a typical ABE can include three components including a wild-type E. coli tRNA-specific adenosine deaminase (TadA) monomer, which can play a structural role during base editing, a TadA* mutant TadA monomer that catalyzes deoxyadenosine deamination, and a Cas nickase such as Cas9(D10A). In certain embodiments, there is a linker positioned between TadA and TadA*, and in certain embodiments there is a linker positioned between TadA* and the Cas nickase. In various embodiments, one or both linkers includes at least 6 amino acids, e.g., at least 5, 6, 7, 8, 9, 10, 15, 20, 25, 30, 35, 40, 45, or 50 amino acids (e.g., having a lower bound of 5, 6, 7, 8, 9, 10, or 15, amino acids and an upper bound of 20, 25, 30, 35, 40, 45, or 50 amino acids). In various embodiments, one or both linkers include 32 amino acids. In some embodiments, one or both linkers has a sequence according to (SGGS)2-XTEN-(SGGS)2, or a sequence otherwise known to those of skill in the art.

[0446] Base editors can directly convert one base or base pair into another, enabling the efficient installation of point mutations in non-dividing cells without generating excess undesired editing by-products, such as insertions and deletions (indels). For example, base editors can generate less than 10%, 9%, 8%, 7%, 6%, 5.5%, 5%, 4.5%, 4%, 3.5%, 3%, 2.5%, 2%, 1.5%, 1%, 0.5%, or 0.1% indels.

[0447] DNA base editors can insert such point mutations in non-dividing cells without generating double-strand breaks. Due to the lack of double-strand breaks, base editors do not result in excess undesired editing by-products, such as insertions and deletions (indels). For example, base editors can generate fewer than 10%, 9%, 8%, 7%, 6%, 5.5%, 5%, 4.5%, 4%, 3.5%, 3%, 2.5%, 2%, 1.5%, 1%, 0.5%, or 0.1% indels as compared to technologies that do rely on double-strand breaks.

[0448] Components of most base-editing systems include (1) a targeted DNA binding protein, (2) a nucleobase deaminase enzyme, and (3) a DNA glycosylase inhibitor.

[0449] Any nuclease of the CRISPR system can be disabled and used within a base editing system. Exemplary Cas nucleases include Casl, CasIB, Cas2, Cas3, Cas4, Cas5, Cas6, Cas7, Cas8, Cas9 (also known as Csnl and Csxl2), CasIO, Cpfl, C2c3, C2c2 and C2clCsyl, Csy2, Csy3, Cse1, Cse2, Cscl, Csc2, Csa5, Csn2, Csm2, Csm3, Csm4, Csm5, Csm6, Cmr1, Cmr3, Cmr4, Cmr5, Cmr6, Cpfl, Csbl, Csb2, Csb3, Csxl7, Csxl4, CsxIO, Csxl6, CsaX, Csx3, Csxl, Csxl5, Csf1, Csf2, Csf3, Csf4 and mutations thereof.

[0450] Particular embodiments utilize a nuclease-inactive Cas9 (dCas9) as the catalytically disabled nuclease. However, any nuclease of the CRISPR system (many of which are described above) can be disabled and used within a base editing system. In particular embodiments, a Cas9 domain with high fidelity is selected wherein the Cas9 domain displays decreased electrostatic interactions between the Cas9 domain and a sugar-phosphate backbone of a DNA, as compared to a wild-type Cas9 domain. In some embodiments, a Cas9 domain (e.g., a wild type Cas9 domain) includes one or more mutations that decrease the association between the Cas9 domain and a sugar-phosphate backbone of a DNA. Cas9 domains with high fidelity are known to those skilled in the art. For example, Cas9 domains with high fidelity have been described in Kleinstiver, et al., Nature 529, 490-495, 2016; and Slaymaker et al., Science 351, 84-88, 2015.

[0451] Nucleases from other gene-editing systems may also be used. For example, base-editing systems can utilize zinc finger nucleases (ZFNs) (Urnov et al., Nat Rev Genet., 11(9):636-46, 2010) and transcription activator like effector nucleases (TALENs) (Joung et al., Nat Rev Mol Cell Biol. 14(1):49-55, 2013). For additional information regarding DNA-binding nucleases, see US2018/0312825A1.

[0452] In particular embodiments, the nucleobase deaminase enzyme includes a cytidine deaminase domain or an adenine deaminase domain.

[0453] Particular embodiments utilize a cytidine deaminase domain as the nucleobase deaminase enzyme. Particular embodiments utilize an adenine deaminase domain as the nucleobase deaminase enzyme. Further, particular embodiments utilize a uracil glycosylase inhibitor (UGI) as a glycosylase inhibitor. For example, in particular embodiments, dCas9 or a Cas9 nickase can be fused to a cytidine deaminase domain. The dCas9 or a Cas9 nickase fused to the cytidine deaminase domain can be fused to one or more UGI domains. Base editors with more than one UGI domain can generate less indels and more efficiently deaminates target nucleic acids.

[0454] In particular embodiments, a deaminase domain (cytidine and/or adenine) is fused to the N-terminus of the catalytically disabled nuclease. This is because a cytidine deaminase domain fused to the N-terminus of Cas9 can have improved base-editing efficiency when compared to other configurations. In these embodiments, a glycosylase inhibitor (e.g., UGI domain) can be fused to the C-terminus of the catalytically disabled nuclease. When multiple glycosylase inhibitors are used, each can be fused to the C-terminus of the catalytically disabled nuclease.

[0455] In particular embodiments, CBE utilizing a cytidine deaminase domain convert guanine-cytosine base pairs into thymine-adenine base pairs by deaminating the exocyclic amine of the cytosine to generate uracil. Examples of cytosine deaminase enzymes include APOBECI, APOBEC3A, APOBEC3G, CDA1, and AID. APOBECI particularly accepts single stranded (ss)DNA as a substrate but is incapable of acting on double stranded (ds)DNA.

[0456] Most base-editing systems also include a DNA glycosylase inhibitor that serves to override natural DNA repair mechanisms that might otherwise repair the intended base editing. In particular embodiments, the DNA glycosylase inhibitor includes an uracil glycosylase inhibitor, such as the uracil DNA glycosylase inhibitor protein (UGI) described in Wang et al. (Gene 99, 31-37, 1991).

[0457] Components of base editors can be fused directly (e.g., by direct covalent bond) or via linkers. For example, the catalytically disabled nuclease can be fused via a linker to the deaminase enzyme and/or a glycosylase inhibitor. Multiple glycosylase inhibitors can also be fused via linkers. As will be understood by one of ordinary skill in the art, linkers can be used to link any peptides or portions thereof.

[0458] Exemplary linkers include polymeric linkers (e.g., polyethylene, polyethylene glycol, polyamide, polyester); amino acid linkers; carbon-nitrogen bond amide linkers; cyclic or acyclic, substituted or unsubstituted, branched or unbranched aliphatic or heteroaliphatic linkers; monomeric, dimeric, or polymeric aminoalkanoic acid linkers; aminoalkanoic acid (e.g., glycine, ethanoic acid, alanine, β-alanine, 3-aminopropanoic acid, 4-aminobutanoic acid, 5-pentanoic acid) linkers; monomeric, dimeric, or polymeric aminohexanoic acid (Ahx) linkers; carbocyclic moiety (e.g., cyclopentane, cyclohexane) linkers; aryl or heteroaryl moiety linkers; and phenyl ring linkers.

[0459] Linkers can also include functionalized moieties to facilitate attachment of a nucleophile (e.g., thiol, amino) from a peptide to the linker. Any electrophile may be used as part of the linker. Exemplary electrophiles include activated esters, activated amides, Michael acceptors, alkyl halides, aryl halides, acyl halides, and isothiocyanates.

[0460] In particular embodiments, linkers range from 4-100 amino acids in length. In particular embodiments, linkers are 4 amino acids, 9 amino acids, 14 amino acids, 16 amino acids, 32 amino acids, or 100 amino acids.

[0461] Numerous base-editing (BE) systems formed by linking targeted DNA binding proteins with cytidine deaminase enzymes and DNA glycosylase inhibitors (e.g., UGI) have been described. These complexes include for example, BEI ([APOBECI-16 amino acid (aa) linker-Sp dCas9 (D10A, H840A)] Korner et al., Nature, 533, 420-424, 2016), BE2 ([APOBECI-16aa linker-Sp dCas9 (D10A, H840A)-4aa linker-UGI] Komer et al., 2016 supra), BE3 ([APOBECI-16aa linker-Sp nCas9 (D10A)-4aa linker-UGI]Korner et al., supra), HF-BE3 ([APOBECI-16aa linker-HF nCas9 (D10A)-4aa linker-UGI] Rees et al., Nat. Commun. 8, 15790, 2017), BE4, BE4max ([APOBECI-32aa linker-Sp nCas9 (D10A)-9aa linker-UGI-9aa linker-UGI] Koblan et al., Nat. Biotechnol 10.1038/nbt.4172, 2018; Komer et al., Sci. Adv., 3, eaao4774, 2017), BE4-GAM ([Gam-16aa linker-APOBECI-32aa linker-Sp nCas9 (D10A)-9aa linker-UGI-9aa linker-UGI] Komer et al., 2017 supra), YE1-BE3 ([APOBECI (W90Y, R126E)-16aa linker-Sp nCas9 (D10A)-4aa linker-UGI] Kim et al., Nat. Biotechnol. 35, 475-480, 2017), EE-BE3 ([APOBECI (R126E, R132E)-16aa linker-Sp nCas9 (D10A)-4aa linker-UGI] Kim et al., 2017 supra), YE2-BE3 ([APOBECI (W90Y, R132E)-16aa linker-Sp nCas9 (D10A)-4aa linker-UGI]Kim et al., 2017 supra), YEE-BE3 ([APOBECI (W90Y, R126E, R132E)-16aa linker-Sp nCas9 (D10A)-4aa linker-UGI] Kim et al., 2017 supra), VQR-BE3 ([APOBECI-16aa linker-Sp VQR nCas9 (D10A)-4aa linker-UGI] Kim et al., 2017 supra), VRER-BE3 ([APOBECI-16aa linker-Sp VRER nCas9 (D10A)-4aa linker-UGI] Kim et al., Nat. Biotechnol. 35, 475-480, 2017), Sa-BE3 ([APOBECI-16aa linker-Sa nCas9 (D10A)-4aa linker-UGI] Kim et al., 2017 supra), SA-BE4 ([APOBECI-32aa linker-Sa nCas9 (D10A)-9aa linker-UGI-9aa linker-UGI] Komer et al., 2017 supra), SaBE4-Gam ([Gam-16aa linker-APOBECI-32aa linker-Sa nCas9 (D10A)-9aa linker-UGI-9aa linker-UGI] Komer et al., 2017 supra), SaKKH-BE3 ([APOBECI-16aa linker-Sa KKH nCas9 (D10A)-4aa linker-UGI] Kim et al., 2017 supra), Cas12a-BE ([APOBECI-16aa linker-dCas12a-14aa linker-UGI], Li et al., Nat. Biotechnol. 36, 324-327, 2018), Target-AID ([Sp nCas9 (D10A)-100aa linker-CDA1-9aa linker-UGI] Nishida et al., Science, 353, 10.1126/science.aaf8729, 2016), Target-AID-NG ([Sp nCas9 (D10A)-NG-100aa linker-CDA1-9aa linker-UGI] Nishimasu et al., Science, 361(6408): 1259-1262, 2018), xBE3 ([APOBECI-16aa linker-xCas9(D10A)-4aa linker-UGI] Hu et al., Nature, 556, 57-63, 2018), eA3A-BE3 ([APOBEC3A (N37G)-16aa linker-Sp nCas9(D10A)-4aa linker-UGI] Gerkhe et al., Nat. Biotechnol., 10.1038/nbt.4199, 2018), A3A-BE3 ([hAPOBEC3A-16aa linker-Sp nCas9(D10A)-4aa linker-UGI] Wang et al., Nat. Biotechnol. 10.1038/nbt.4198, 2018), and BE-PLUS ([10X GCN4-Sp nCas9(D10A)/ScFv-rAPOBEC1-UGI] Jiang et al., Cell. Res, 10.1038/s41422-018-0052-4, 2018). For additional examples of BE complexes, including adenine deaminase base editors, see Rees & Liu Nat. Rev Genet. 19(12): 770-788, 2018.

[0462] For additional information regarding base editors, see US2018/0312825A1, WO2018/165629A, Urnov et al., Nat Rev Genet. 11(9):636-46, 2010; Joung et al., Nat Rev Mol Cell Biol. 14(1):49-55, 2013; Charpentier et al., Nature.; 495(7439):50-1, 2013; Seo & Kim, Nature Medicine. 24, 1493-1495, 2018, and Rees & Liii, Nature Reviews Genetics, 19, 770-78, 2018, each of which is incorporated herein by reference in its entirety and with specific respect to base editors. Certain base editor constructs that can be used in various embodiments of the present disclosure are described in Zafra et al., Nat Biotech, 36(9):888-893, 2018, and Koblan et al., Nat Biotech 36(9):843-846, 2018, each of which is incorporated herein by reference in its entirety and with specific respect to base editor constructs.

[0463] In some embodiments a base editor system is engineered to modify a nucleic acid sequence that encodes γ-globin, e.g., to increase expression of γ-globin. The main fetal form of hemoglobin, hemoglobin F (HbF) is formed by pairing of γ-globin polypeptides with α-globin polypeptides. Human fetal γ-globin genes (HBG1 and HBG2; two highly homologous genes produced by evolutionary duplication) are ordinarily silenced around birth, while expression of adult β-globin gene expression (HBB and HBD) increases. Mutations that cause or permit persistent expression of fetal γ-globin throughout life can ameliorate phenotypes of β-globin deficiencies. Thus, reactivation of fetal γ-globin genes can be therapeutically beneficially, particularly in subjects with β-globin deficiency. A variety of mutations that cause increased expression of γ-globin are known in the art or disclosed herein (see, e.g., Wienert Trends in Genetics 34(12): 927-940, 2018, which is incorporated herein by reference in its entirety and with respect to mutations that increase expression of γ-globin). Certain such mutations are found in the HBG1 promoter or HBG2 promoter.

[0464] In some embodiments, a vector or genome includes a base editing system in which a payload includes an integration element and at least one component of the base editing system is present in the payload but outside of the integration element (e.g., outside of the fragment of a payload including a transposable integration element that is flanked by the transposon inverted repeats or outside of the fragment of a payload that includes homology arms for homologous integration). In certain particular embodiments in which a payload includes a transposable integration element, where the transposable integration element is flanked by transposon inverted repeats, one or more of a base editing enzyme and/or one or more gRNAs of the base editing system are present in the payload at a position outside of (i.e., not present in) the transposable integration element (i.e., not present in the nucleic acid sequence flanked by the transposon inverted repeats). In certain particular embodiments in which a payload includes a transposable integration element, where the transposable integration element is flanked by homology arms, one or more of a base editing enzyme and/or one or more gRNAs of the base editing system are present in the payload at a position outside of (i.e., not present in) the integration element (i.e., not present in the nucleic acid sequence flanked by the homology arms). In such systems, expression and/or activity of the base editing system is transient, in that transposition of the transposable integration element can disrupt the vector and reduce or terminate expression of one or more of the base editing system components positioned outside of the transposable integration element. Such vectors that include base editing systems can sometimes be referred to as “self-inactivating” base editing systems or vectors because integration of the integration element (e.g., by transposition or homologous recombination) can inactivate expression and/or activity of the base editing system. In various embodiments, a self-inactivating base editing system is present in a combination payload.

[0465] The present disclosure includes that an adenoviral vector (e.g., an HDAd adenoviral vector) including a self-inactivating base editing system payload can generate an increased cleavage frequency in gene therapy (e.g., in vivo gene therapy) and/or increased survival of transduced and/or edited target cells (e.g., increased survival of transduces HSPCs) as compared to other base editing system payloads, e.g., wherein a base editing system is fully within an integration element or in which the base editing system does not integrate into a host cell genome but expression is not inactivated by vector disruption. Self-inactivation of base editing systems shortens expression of the base editor enzyme and/or gRNAs, increases survival of edited cells, and increases the percentage of long-term repopulating cells, For example, gene therapy using HDAd vectors including a combination payload including a self-inactivating base editing system for reactivation of HBG1 and/or HBG2 and further including a nucleic acid sequence for expression of γ-globin can produce significantly higher γ-globin in RBCs after transduction that HDAd vectors including either a non-inactivating base editing system or nucleic acid sequence for expression of γ-globin alone.

[0466] Further provided herein are methods in which a donor vector including a self-inactivating base editing system is administered, e.g., to a human subject, in combination with a support vector or genome encoding a transposase for transposition of the integration element. The present disclosure includes that in various instances the donor vector is administered prior to administration of the support vector, wherein the time period between administration of the donor vector and administration of the support vector provides a means of regulating the duration and/or level of activity of the base editing system. For instance, in various embodiments, a support vector may be administered, e.g., to a subject, a period of time after administration of the donor vector where the period of time is at least 1, 2, 3, 4, 5, 6, 8, 10, 12, 14, 16, 18, 20, 22, 24, 30, 36, 42, 48, 54, 60, 66, or 72, 96, or 128 hours (e.g., wherein the period has a lower bound of 1, 2, 3, 4, 5, 6, 8, 10, 12, 14, 16, 18, 20, 22, 24, 30, 36, 42, 48, 54, 60, 66, or 72 hours and an upper bound of 6, 8, 10, 12, 14, 16, 18, 20, 22, 24, 30, 36, 42, 48, 54, 60, 66, 72, 96, or 128 hours).

[0467] In some embodiments, a nucleic acid sequence encoding a base editing system component (e.g., encoding a base editing enzyme) is engineered to include a microRNA target site for microRNA regulation of base editor expression and/or activity.

[0468] The present disclosure further recognized and solved a problem in the utilization of ABE systems. The present disclosure includes the recognition that repetitiveness and/or sequence similarity in base editor TadA and TadA* sequences can result in homologous recombination that reduces the efficacy of such vectors for expression and/or activity of encoded base editing systems, e.g., for in vivo gene therapy. To the knowledge of the present inventors, the present disclosure represents the first recognition of this problem, e.g., as observed in in vivo gene therapy. To address the problem, TadA and/or TadA* were modified to achieve reduced homology between similar sequences. In various embodiments, at least 5 corresponding codons of nucleic acid sequences encoding TadA and TadA* are engineered to have different nucleotide sequences, optionally wherein the engineering includes replacement of an initial codon sequence in the TadA or TadA* nucleotide sequence with a different codon sequence that encodes the same amino acid according to codon usage in a relevant system, e.g., in humans. In various embodiments, at least 5, 10, 15, 20, 25, 30, 35, 40, 45, or 50 codons are engineered to differ between nucleic acid sequences respectively encoding TadA and TadA*. Exemplary engineered sequences are shown in FIG. 132C.

[0469] In various embodiments, an ABE includes TadA and TadA* sequences that include at least one sequence modification relative to the following TadA and TadA* sequences, which can be, e.g., directly fused or separated by a linker in a sequence encoding an ABE. In various embodiments a TadA sequence is a sequence that has at least 80% identity with the below TadA sequence (e.g., at least 80%, 85%, 90%, 95%, 96%, 97%, 98%, 99%, or 100% identity) and can include any or all TadA modifications provided herein. In various embodiments a TadA* sequence is a sequence that has at least 80% identity with the below TadA* sequence (e.g., at least 80%, 85%, 90%, 95%, 96%, 97%, 98%, 99%, or 100% identity) and can include any or all TadA* modifications provided herein. In various embodiments a TadA and/or a TadA* sequence of the present disclosure can include, or not include, a linker such as a 32 amino acid linker. In various sequences and embodiments, including those including the TadA and/or TadA* sequences provided below, a sequence can include a 3′ sequence of 96 nucleotides encoding a 32 amino acid linker. Accordingly, in various embodiments a TadA sequence is a sequence that has at least 80% identity with nucleotides 1-498 (excluding 96 3′ nucleotides) of the below TadA sequence (e.g., at least 80%, 85%, 90%, 95%, 96%, 97%, 98%, 99%, or 100% identity) and can include any or all corresponding TadA modifications provided herein. Also accordingly, in various embodiments a TadA* sequence is a sequence that has at least 80% identity with nucleotides 1-498 (excluding 96 3′ nucleotides) of the below TadA* sequence (e.g., at least 80%, 85%, 90%, 95%, 96%, 97%, 98%, 99%, or 100% identity) and can include any or all corresponding TadA* modifications provided herein.

[0470] In various embodiments, the sequence of a TadA and/or a TadA* of an ABE are engineered to reduce the percent identity between the TadA and the TadA* (or an aligned portion thereof, e.g., including nucleotides 1 to 579 or 1 to 498) to less than 80% (e.g., less than 80%, 75%, 70%, 65%, 60%, 55%, 50%, 45%, or 40%, or a percent identity that is between 60% and 80%, 65% and 80%, 70%, and 80%, 75% and 80%, 60% and 75%, 65% and 75%, 70% and 75%, 60% and 70%, or 65% and 70%). In the pCMV-ABEmax plasmid (Addgene #112095) produced by others, there are 109 bp mismatches between the two 594 bp TadA+32aa repeats, having an identity of 81.6%. Sites for TadA and/or TadA* modification in various present embodiments include those underlined in the below sequences and described in the following tables. In various embodiments, a TadA* sequence includes one or more, or all, modifications corresponding to those shown in the TadA* modification table (Table 11). In various embodiments, a TadA sequence includes one or more, or all, modifications shown in the TadA modification table (Table 10) and a TadA* sequence includes one or more, or all, modifications corresponding to those shown in the TadA* modification table (Table 11). In certain particular embodiments, a TadA sequence includes 0, 1, 2, 3, 4, 5, 6, 7, 8. 9. 10, 11, 12, 13, 14, 15, 16, 17, 18, 19, 20, 21, 22, 23, 24, or 25 modifications (e.g., 1 to 5, 5 to 10, 5 to 20, 5 to 25, 10 to 20, 10 to 25, 15 to 20, 15 to 25, or 20 to 25 modifications) corresponding to those shown in the TadA modification table (Table 10; with reference to SEQ ID NO: 280) and a TadA* sequence includes 0, 1, 2, 3, 4, 5, 6, 7, 8. 9. 10, 11, 12, 13, 14, 15, or 16 modifications (e.g., 1 to 5, 5 to 10, 5 to 16, or 10 to 16 modifications) corresponding to those shown in the TadA* modification table (Table 11; with reference to SEQ ID NO: 281).

[0471] As those of skill in the art will appreciate, decreased-identity TadA and TadA* sequences are of general utility in the field of genetic engineering, including without limitation in in vivo and ex vivo genetic engineering. TadA and TadA* sequences engineered to have decreased identity can also be included in payloads (e.g., payloads of the present disclosure), e.g., an in adenoviral vector or genome such as an Ad35, Ad35++, HDAd35, or HDAd35++donor vector or donor genome, e.g., for in vivo gene therapy.

TABLE 11
TadA* modification table

| Position | nucleotide change |
|---|---|
| 321 | C > T |
| 330 | C > T |
| 345 | C > T |
| 382 | C > A |
| 384 | C > A |
| 465 | C > T |
| 498 | C > T |
| 499 | T > A |
| 500 | C > G |
| 501 | C > T |
| 504 | A > C |
| 516 | A > G |
| 537 | A > C |
| 592 | T > A |
| 593 | C > G |
| 594 | A > C |

Reference Sequences:
TadA (SEQ ID NO: 280)
TadA* (SEQ ID NO: 281)

TABLE 10
TadA modification table

| Position | nucleotide change |
|---|---|
| 15 | T > C |
| 57 | G > A |
| 63 | A > C |
| 69 | T > C |
| 87 | G > C |
| 112 | A > C |
| 114 | A > C |
| 126 | G > A |
| 147 | C > A |
| 198 | C > A |
| 216 | C > T |
| 289 | A > C |
| 318 | G > A |
| 333 | C > A |
| 343 | T > A |
| 344 | C > G |
| 369 | C > A |
| 402 | A > C |
| 451 | C > A |
| 507 | A > C |
| 547 | A > T |
| 548 | G > C |
| 568 | A > T |
| 569 | G > C |
| 570 | C > T |

[0472] Those of skill in the art will further appreciate that the number of modifications corresponding to those of the TadA modification table and/or the TadA* modification table that are present in an ABE including a TadA sequence and a TadA* sequence can be significant without consideration of the particular modifications selected, at least insofar as reduction of the identity between the TadA and TadA* nucleotide sequences is a solution to the identified problem that does not require any particular modification but rather an overall change in the identity between the TadA and TadA* sequences. Thus, while the present disclosure provides exemplary modifications, inclusion or exclusion of any particular modification is not critical to the solution presented herein. The present disclosure therefore includes reduced-identity sequences of TadA and TadA* that include one or more modifications presented in the TadA and TadA* modification tables and have a percent identity between the TadA and the TadA* (or an aligned portion thereof, e.g., including nucleotides 1 to 579) that is less than 80% (e.g., less than 80%, 75%, 70%, 65%, 60%, 55%, 50%, 45%, or 40%).

[0473] For the avoidance of doubt, a provided sequence can be identified as including or not including any TadA or TadA* sequence modification provided herein by comparison to a corresponding nucleotide position of the below TadA and TadA* sequences. Accordingly, determination of the presence or absence of any TadA or TadA* sequence modification provided herein does not depend upon the origin or history of any provided sequence and can be determined solely from the sequence itself.

[0474] Those of skill in the art will appreciate that ABE systems of the present disclosure, as well as TadA and TadA* sequences thereof, represent contributions of general utility not limited to the present context or any other context set forth in the present specification, e.g., not limited to use in a particular vector, serotype, or other context. Indeed, sequences of the present disclosure can be used in vivo, in vitro, or ex vivo, in any experimental system that can encode or include base editing components. The sequences are useful as tools in various molecular biology applications.

### I(C)(i)(c). Small RNA Payload Expression Products

[0475] Small RNAs are short, non-coding RNA molecules that play a role in regulating gene expression. In particular embodiments, small RNAs are less than 200 nucleotides in length. In particular embodiments, small RNAs are less than 100 nucleotides in length. In particular embodiments, small RNAs are less than 50, 45, 40, 35, 30, 25, or 20 nucleotides in length. In particular embodiments, small RNAs are less than 20 nucleotides in length. In various embodiments a small RNA has a length having a lower bound of 5, 10, 15, 20, 25, or 30 nucleotides and an upper bound of 20, 25, 30, 35, 40, 45, 50, 75, or 100 nucleotides. Small RNAs include but are not limited to microRNAs (miRNAs, Piwi-interacting RNAs (piRNAs), small interfering RNAs (siRNAs), small nucleolar RNAs (snoRNAs), tRNA-derived small RNAs (tsRNAs) small rDNA-derived RNAs (srRNAs), and small nuclear RNAs. Additional classes of small RNAs continue to be discovered.

[0476] In particular embodiments, interfering RNA molecules that are homologous to a target mRNA or to which the interfering RNA can hybridize can lead to degradation of the target mRNA molecule or reduced translation of the target mRNA, a process referred to as RNA interference (RNAi) (Carthew, Curr. Opin. Cell. Biol. 13: 244-248, 2001). RNAi occurs in cells naturally to remove foreign RNAs (e.g., viral RNAs). In some instances, natural RNAi proceeds via fragments cleaved from free double-strand RNA (dsRNA) which direct the degradative mechanism to other similar RNA sequences. Alternatively, RNAi can be manufactured, for example, to silence the expression of target genes. Exemplary RNAi molecules include small hairpin RNA (shRNA, also referred to as short hairpin RNA) and small interfering RNA (siRNA).

[0477] Without limiting the disclosure, and without being bound by theory, RNA interference in nature and/or in some embodiments is typically a two-step process. In the first step, the initiation step, input dsRNA is digested into 21-23 nucleotide (nt) siRNA, probably by the action of Dicer, a member of the ribonuclease (RNase) III family of dsRNA-specific ribonucleases, which processes (cleaves) dsRNA (introduced directly or via a transgene or a virus) in an ATP-dependent manner. Successive cleavage events degrade the RNA to 19-21 base pair (bp) duplexes (siRNA), each with 2-nucleotide 3′ overhangs (Hutvagner & Zamore, Curr. Opin. Genet. Dev. 12: 225-232, 2002; Bernstein, Nature 409:363-366, 2001).

[0478] In a second step, an effector step, the siRNA duplexes bind to a nuclease complex to form the RNA-induced silencing complex (RISC). An ATP-dependent unwinding of the siRNA duplex is required for activation of the RISC. The active RISC then targets the homologous transcript by base pairing interactions and typically cleaves the mRNA into 12 nucleotide fragments from the 3′ terminus of the siRNA (Hutvagner & Zamore, Curr. Opin. Genet. Dev. 12: 225-232, 2002; Hammond et al., Nat. Rev. Gen. 2:110-119, 2001; Sharp, Genes. Dev. 15:485-490, 2001). Research indicates that each RISC contains a single siRNA and an RNase (Hutvagner & Zamore, Curr. Opin. Genet. Dev. 12: 225-232, 2002).

[0479] Because of the remarkable potency of RNAi, an amplification step within the RNAi pathway has been suggested. Amplification could occur by copying of the input dsRNAs which would generate more siRNAs, or by replication of the siRNAs formed. Alternatively or additionally, amplification could be effected by multiple turnover events of the RISC (Hutvagner & Zamore, Curr. Opin. Genet. Dev. 12: 225-232, 2002; Hammond et al., Nat. Rev. Gen. 2:110-119, 2001; Sharp, Genes. Dev. 15:485-490, 2001). RNAi is also described in Tuschl (Chem. Biochem. 2: 239-245, 2001); Cullen (Nat. Immunol. 3:597-599, 2002); and Brantl (Biochem. Biophys. Act. 1575:15-25, 2002).

[0480] In some embodiments, synthesis of RNAi molecules suitable for use with the present disclosure can be performed as follows. First, an mRNA sequence can be scanned downstream of the start codon of targeted transgene. Occurrence of each AA and the 3′ adjacent 19 nucleotides is recorded as potential siRNA target sites. In particular embodiments, the siRNA target sites can be selected from the open reading frame, as untranslated regions (UTRs) are richer in regulatory protein binding sites. UTR-binding proteins and/or translation initiation complexes may interfere with binding of the siRNA endonuclease complex (Tuschl, Chem. Biochem. 2: 239-245, 2001). It will be appreciated though, that siRNAs directed at untranslated regions may also be effective, as demonstrated for Glyceraldehyde 3-phosphate dehydrogenase (GAPDH) wherein siRNA directed at the 5′ UTR mediated a 90% decrease in cellular GAPDH mRNA and completely abolished protein level. Second, potential target sites can be compared to an appropriate genomic database using any sequence alignment software, such as the Basic Local Alignment Search Tool (BLAST) software available from the National Center for Biotechnology Information (NCBI) server. Putative target sites which exhibit significant homology to other coding sequences can be filtered out.

[0481] Qualifying target sequences can be selected as templates for siRNA synthesis. Selected sequences can include those with low G/C content as these have been shown to be more effective in mediating gene silencing as compared to those with G/C content higher than 55%. Several target sites can be selected along the length of the target gene for evaluation. For better evaluation of the selected siRNAs, a negative control can be used. Negative control siRNA can include the same nucleotide composition as the siRNAs but lack significant homology to the genome. Thus, a scrambled nucleotide sequence of the siRNA may be used, provided it does not display any significant homology to other genes.

[0482] A sense strand can be designed based on the sequence of the selected portion. The antisense strand is routinely the same length as the sense strand and includes complementary nucleotides. In particular embodiments, the strands are fully complementary and blunt-ended when aligned or annealed. In other embodiments, the strands align or anneal such that 1-, 2- or 3-nucleotide overhangs are generated, i.e., the 3′ end of the sense strand extends 1, 2 or 3 nucleotides further than the 5′ end of the antisense strand and/or the 3′ end of the antisense strand extends 1, 2 or 3 nucleotides further than the 5′ end of the sense strand. Overhangs can include nucleotides corresponding to the target gene sequence (or complement thereof). Alternatively, overhangs can include deoxyribonucleotides, for example deoxythymines (dTs), or nucleotide analogs, or other suitable non-nucleotide material.

[0483] To facilitate entry of the antisense strand into RISC (and thus increase or improve the efficiency of target cleavage and silencing), the base pair strength between the 5′ end of the sense strand and 3′ end of the antisense strand can be altered, e.g., lessened or reduced. In particular embodiments, the base-pair strength is less due to fewer G:C base pairs between the 5′ end of the first or antisense strand and the 3′ end of the second or sense strand than between the 3′ end of the first or antisense strand and the 5′ end of the second or sense strand. In particular embodiments, the base pair strength is less due to at least one mismatched base pair between the 5′ end of the first or antisense strand and the 3′ end of the second or sense strand. Preferably, the mismatched base pair is selected from the group including G:A, C:A, C:U, G:G, A:A, C:C and U:U. In another embodiment, the base pair strength is less due to at least one wobble base pair, e.g., G:U, between the 5′ end of the first or antisense strand and the 3′ end of the second or sense strand. In another embodiment, the base pair strength is less due to at least one base pair including a rare nucleotide, e.g., inosine (I). In particular embodiments, the base pair is selected from the group including an I:A, I:U and I:C. In yet another embodiment, the base pair strength is less due to at least one base pair including a modified nucleotide. In particular embodiments, the modified nucleotide is selected from, for example, 2-amino-G, 2-amino-A, 2,6-diamino-G, and 2,6-diamino-A.

[0484] ShRNAs are single-stranded polynucleotides with a hairpin loop structure. The single-stranded polynucleotide has a loop segment linking the 3′ end of one strand in the double-stranded region and the 5′ end of the other strand in the double-stranded region. The double-stranded region is formed from a first sequence that is hybridizable to a target sequence, such as a polynucleotide encoding transgene, and a second sequence that is complementary to the first sequence, thus the first and second sequence form a double stranded region to which the linking sequence connects the ends of to form the hairpin loop structure. The first sequence can be hybridizable to any portion of a polynucleotide encoding transgene. The double-stranded stem domain of the shRNA can include a restriction endonuclease site.

[0485] Transcription of shRNAs is initiated at a polymerase III (Pol III) promoter and is thought to be terminated at position 2 of a 4-5-thymine transcription termination site. Upon expression, shRNAs are thought to fold into a stem-loop structure with 3′ UU-overhangs; subsequently, the ends of these shRNAs are processed, converting the shRNAs into siRNA-like molecules of 21-23 nucleotides (Brummelkamp et al., Science. 296(5567):550-553, 2002; Lee et al., Nature Biotechnol. 20(5):500-505, 2002; Miyagishi & Taira, Nature Biotechnol. 20(5):497-500, 2002; Paddison et al., Genes & Dev. 16(8): 948-958, 2002; Paul et al., Nature Biotechnol. 20(5):505-508, 2002; Sui, Proc. Natl. Acad. Sci. USA. 99(6):5515-5520, 2002; Yu et al., Proc. Natl. Acad. Sci. USA. 99(9):6047-6052, 2002).

[0486] The stem-loop structure of shRNAs can have optional nucleotide overhangs, such as 2-bp overhangs, for example, 3′ UU overhangs. While there may be variation, stems typically range from 15 to 49, 15 to 35, 19 to 35, 21 to 31 bp, or 21 to 29 bp, and the loops can range from 4 to 30 bp, for example, 4 to 23 bp. In particular embodiments, shRNA sequences include 45-65 bp; 50-60 bp; or 51, 52, 53, 54, 55, 56, 57, 58, or 59 bp. In particular embodiments, shRNA sequences include 52 or 55 bp. In particular embodiments siRNAs have 15-25 bp. In particular embodiments siRNAs have 16, 17, 18, 19, 20, 21, 22, 23, or 24 bp. In particular embodiments siRNAs have 19 bp. The skilled artisan will appreciate, however, that siRNAs having a length of less than 16 nucleotides or greater than 24 nucleotides can also function to mediate RNAi. Longer RNAi agents have been demonstrated to elicit an interferon or Protein kinase R (PKR) response in certain mammalian cells which may be undesirable. Preferably the RNAi agents do not elicit a PKR response (i.e., are of a sufficiently short length). However, longer RNAi agents may be useful, for example, in situations where the PKR response has been downregulated or dampened by alternative means.

[0487] Small RNAs may also be used to activate gene expression.

### I(C)(i)(d). Combination Payloads

[0488] The present disclosure includes adenoviral vectors and genomes in that include a payload that encodes a plurality of expression products. Payloads that encode a plurality of expression products can be referred to as combination payloads. In various embodiments, combination payload can include a first nucleic acid sequence encoding a first expression product and a second nucleic acid sequence encoding a second expression product. In various embodiments, each of the first and second expression products can be independently selected from any of a protein (e.g., a therapeutic protein, e.g., a replacement enzyme), binding domain, antibody, CAR, TCR, CRISPR system, base editor system, a small RNA, and/or a selectable marker e.g., as disclosed herein, Exemplary combination payloads are disclosed herein.

[0489] Those of skill in the art will appreciate that coding sequences can be controlled by and/or expressed in operable linkage with any of a variety of promoters and/or other regulatory sequences provided herein or otherwise known in the art. As those of skill in the art will be aware, and as exemplified in the present disclosure, sequences available to control and/or express a coding sequence in a vector are known in the art and include those provided herein. In various particular examples, a coding sequence present in a payload of the present disclosure can be operably linked with one or more regulatory sequences optionally selected from a promoter, enhancer, termination region, insulator, mini-LCR, termination signal, polyadenylation signal, splicing signal, and the like.

[0490] In some embodiments, a combination payload encodes one or more, or all, components of a CRISPR system including a CRISPR-associated RNA-guided endonuclease and at least one guide RNA (gRNA), optionally wherein the at least one gRNA include 1, 2, 3, 4, or 5 gRNAs, and optionally one or more further coding sequences not part of the CRISPR system. For example, gRNAs of a CRISPR system can include one or more, or all, of a gRNA that targets a nucleic acid sequence of HBG1 promoter, a gRNA that targets a nucleic acid sequence of HBG2 promoter, and/or a gRNA that targets a nucleic acid sequence of erythroid enhancer bcl11a. In various embodiments, (i) the HBG1 promoter-targeted gRNA is designed to increase expression of a γ-globin coding sequence operably linked to the HBG1 promoter by inactivation of a BCL11A repressor protein binding site in the HBG1 promoter, (ii) the HBG2 promoter-targeted gRNA is designed to increase expression of a γ-globin coding sequence operably linked to the HBG2 promoter by inactivation of a BCL11A repressor protein binding site in the HBG2 promoter, and/or (iii) the bcl11a-targeted gRNA is designed to increase expression of a γ-globin coding sequence operably linked to the bcl11a enhancer, where modification and/or inactivation of the erythroid bcl11a enhancer results in reduced BCL11A repressor protein expression in erythroid cells. In various embodiments, a combination payload that includes a CRISPR system further includes a nucleic acid encoding a therapeutic protein, optionally wherein the therapeutic protein is selected from one or more of γ-globin and β-globin. In some embodiments, the therapeutic protein is operably linked with a β-globin promoter and/or a β-globin LCR.

[0491] In some embodiments, a combination payload encodes one or more, or all, components of a base editor system including a base editing enzyme and at least one guide RNA (gRNA), optionally wherein the at least one gRNA include 1, 2, 3, 4, or 5 gRNAs, and optionally one or more further coding sequences not part of the base editor system. For example, gRNAs of a base editor system can include one or more, or all, of a gRNA that targets a nucleic acid sequence of HBG1 promoter, a gRNA that targets a nucleic acid sequence of HBG2 promoter, and/or a gRNA that targets a nucleic acid sequence of erythroid enhancer bcl11a. In various embodiments, (i) the HBG1 promoter-targeted gRNA is designed to increase expression of a γ-globin coding sequence operably linked to the HBG1 promoter by inactivation of a BCL11A repressor protein binding site in the HBG1 promoter, (ii) the HBG2 promoter-targeted gRNA is designed to increase expression of a γ-globin coding sequence operably linked to the HBG2 promoter by inactivation of a BCL11A repressor protein binding site in the HBG2 promoter, and/or (iii) the bcl11a-targeted gRNA is designed to increase expression of a γ-globin coding sequence operably linked to the bcl11a enhancer, where modification and/or inactivation of the erythroid bcl11 a enhancer results in reduced BCL11A repressor protein expression in erythroid cells. In various embodiments, a combination payload that includes a base editor system further includes a nucleic acid encoding a therapeutic protein, optionally wherein the therapeutic protein is selected from one or more of γ-globin and β-globin. In some embodiments, the therapeutic protein is operably linked with a β-globin promoter and/or a β-globin LCR.

[0492] In some embodiments, a combination payload includes a nucleic acid sequence that encodes an antibody. In some embodiments a combination payload includes a first nucleic acid sequence that encodes a first antibody and a second nucleic acid sequence that encodes a second antibody. In some embodiments, the antibody (e.g., a first and/or a second antibody) is an scFv. In some embodiments the antibody is an antibody that includes an immunoglobulin heavy chain and an immunoglobulin light chain.

[0493] In various embodiments, at least one expression product encoded by a payload nucleic acid sequence of a combination payload is a selectable marker. In various embodiments, the selectable marker is MGMT^{P140K}.

[0494] Exemplary Ad35 payloads and systems include:

[0495] (i) In various embodiments, an Ad35 payload includes an integration element flanked by transposase inverted repeats for transposition by SB100x, and the transposase inverted repeats are flanked by frt direct repeats for recombination by an FLP recombinase such as FLPe. In various embodiments, the integration element includes, optionally from 5′ to 3′, (a) a β-globin mini-LCR, (b) a gene including a β-globin promoter operably linked with a human γ-globin coding sequence, which γ-globin coding sequence is operably linked with a 3′UTR (e.g., a γ-globin 3′UTR), where the β-globin mini-LCR is also operably linked with the γ-globin coding sequence (c) a cHS4 insulator sequence, and (d) a gene including a promoter such as a PGK promoter operably linked with an MGMTP¹⁴⁰K coding sequence, a 2A self-cleaving peptide, a GFP fluorescent marker coding sequence, and a polyadenylation signal, optionally where any of (a)-(d) can be encoded in a 5′ to 3′ orientation on either of the two strands of an Ad35 payload.

[0496] In various embodiments, an Ad35 payload further includes, outside of the integration element and outside of the recombinase sites, a nucleic acid sequence encoding a CRISPR system. In certain particular embodiments, the nucleic acid sequence encoding a CRISPR system includes, optionally from 5′ to 3′, (a) a first gRNA gene including a first U6 promoter operably linked with a first gRNA-encoding sequence, where the first gRNA targets bcl11a enhancer, (b) a second gRNA gene including a second U6 promoter operably linked with a second gRNA-encoding sequence, where the second gRNA targets an HBG promoter, and (c) a CRISPR enzyme gene including a promoter such as an EF1α promoter operably linked with a CRISPR/Cas9 coding sequence, wherein the CRISPR/Cas9 coding sequence is operably linked with a 3′UTR/miR sequence and a polyadenylation signal. In various embodiments, the CRISPR system targets the erythroid bcl11a enhancer and the BCL11A binding site of the HBG promoter, each of which contributes to causing γ-globin activation or re-activation. As disclosed herein, the CRISPR system can be self-inactivating, in that cleavage of donor vector by transposition results in degradation of non-integrated donor vector nucleic acids. In various embodiments, a miR sequence can be a sequence that suppresses Cas9 expression in a producer cell during HDAd35 donor vector production (see, e.g., Saydaminova et al., Mol. Ther. Meth. Clin. Dev. 1: 14057, 2015; Li et al., Mol. Ther. Meth. Clin. Dev. 9: 390-401, 2018).

[0497] In various embodiments, an Ad35 system of the present disclosure further includes an Ad35 support vector, where the support vector includes, optionally from 5′ to 3′, (a) a recombines gene including an EF1α promoter operably linked with a FLPe recombinase coding sequence, and (b) a transposase gene including a PGK promoter operably linked with an SB100x transposase coding sequence.

[0498] In various embodiments an Ad35 payload is present in an Ad35 donor vector genome. In various embodiments an Ad35 payload present in an Ad35 donor vector genome is flanked by Ad35 ITRs. In various embodiments, an Ad35 donor vector genome is present in an Ad35 donor vector. In various embodiments, the donor vector is an Ad35++ vector.

[0499] In various embodiments a support genome includes Ad35 ITRs. In various embodiments, a support genome is present in an Ad35 vector. In various embodiments, the support vector is an Ad35++ vector.

[0500] In various embodiments, an Ad35 donor vector is a helper dependent donor vector (HDAd35). In certain such embodiments, systems of the present disclosure can include an HDAd35 donor vector or genome, and Ad35 helper vector or genome, and in various embodiments can further include an Ad35 support vector.

[0501] Certain exemplary embodiments are illustrated in FIG. 164.

[0502] (ii) In various embodiments, an Ad35 payload includes an integration element flanked by homology arms (e.g., 1.8 kb homology arms), having at least 80% identity (e.g., at least 80%, 85%, 90%, 95%, 96%, 97%, 98%, 99%< or 100% identity) with a target cell genome. In various embodiments, the integration element includes, optionally from 5′ to 3′, (a) a β-globin mini-LCR including HS1, HS2, HS3, and HS4, but not HS5, (b) a gene including a β-globin promoter operably linked with a γ-globin coding sequence, which γ-globin coding sequence is operably linked with a γ-globin 3′UTR, where the β-globin mini-LCR is also operably linked with the γ-globin coding sequence (c) a cHS4 insulator sequence, and (d) a gene including a PGK promoter operably linked with an MGMT^{P140K} coding sequence, where the MGMT^{P140K} coding sequence is operably linked with a polyadenylation signal, optionally where any of (a)-(d) can be encoded in a 5′ to 3′ orientation on either of the two strands of an Ad35 payload.

[0503] In various embodiments, an Ad35 payload further includes, outside of the integration element and outside of the recombinase sites, a nucleic acid sequence encoding a CRISPR system. In certain particular embodiments, the nucleic acid sequence encoding a CRISPR system includes, optionally from 5′ to 3′, (a) an sgRNA gene including a U6 promoter operably linked with an sgRNA-encoding sequence, where the sgRNA targets an HBG2 promoter, and (b) a CRISPR enzyme gene including an EF1α promoter operably linked with an spCas9 coding sequence, where the spCas9 coding sequence is operably linked with an miR site, a β-globin 3′UTR sequence, and a polyadenylation signal. In various embodiments, the CRISPR system targets a BCL11A binding site of the HBG promoter and can cause γ-globin activation or re-activation. As disclosed herein, the CRISPR system can be self-inactivating, in that cleavage of donor vector by AAVS1 CRISPR results in degradation of non-integrated donor vector nucleic acids. In various embodiments, a miR sequence can be a sequence that suppresses Cas9 expression in a producer cell during HDAd35 donor vector production (see, e.g., Saydaminova et al., Mol. Ther. Meth. Clin. Dev. 1: 14057, 2015; Li et al., Mol. Ther. Meth. Clin. Dev. 9: 390-401, 2018).

[0504] In various embodiments, an Ad35 system of the present disclosure further includes an Ad35 support vector, where the support vector includes, optionally from 5′ to 3′, a U6 promoter operably linked to an sgAAVS1-rm coding sequence.

[0505] In various embodiments an Ad35 payload is present in an Ad35 donor vector genome. In various embodiments an Ad35 payload present in an Ad35 donor vector genome is flanked by Ad35 ITRs. In various embodiments, an Ad35 donor vector genome is present in an Ad35 donor vector. In various embodiments, the donor vector is an Ad35++ vector.

[0506] In various embodiments a support genome includes Ad35 ITRs. In various embodiments, a support genome is present in an Ad35 vector. In various embodiments, the support vector is an Ad35++ vector.

[0507] In various embodiments, an Ad35 donor vector is a helper dependent donor vector (HDAd35). In certain such embodiments, systems of the present disclosure can include an HDAd35 donor vector or genome, and Ad35 helper vector or genome, and in various embodiments can further include an Ad35 support vector.

[0508] Certain exemplary embodiments are illustrated in FIG. 165.

[0509] (iii) In various embodiments, an Ad35 payload includes an integration element flanked by transposase inverted repeats for transposition by SB100x, and the transposase inverted repeats are flanked by frt direct repeats for recombination by an FLP recombinase such as FLPe. In various embodiments, the integration element includes, optionally from 5′ to 3′, (a) a β-globin mini-LCR, (b) a gene including a β-globin promoter operably linked with a rhesus γ-globin coding sequence, which γ-globin coding sequence is operably linked with a 3′UTR (e.g., a γ-globin 3′UTR), where the β-globin mini-LCR is also operably linked with the γ-globin coding sequence (c) a cHS4 insulator sequence, and (d) a gene including a PGK promoter operably linked with an MGMT^{P140K} coding sequence, where the MGMT^{P140K} coding sequence is operably linked with a polyadenylation signal, optionally where any of (a)-(d) can be encoded in a 5′ to 3′ orientation on either of the two strands of an Ad35 payload.

[0510] In various embodiments, an Ad35 payload further includes, outside of the integration element and outside of the recombinase sites, a nucleic acid sequence encoding a CRISPR system. In certain particular embodiments, the nucleic acid sequence encoding a CRISPR system includes, optionally from 5′ to 3′, (a) a gRNA gene including a U6 promoter operably linked with a gRNA-encoding sequence, where the gRNA targets an HBG promoter, and (b) a CRISPR enzyme gene including an EF1α promoter operably linked with a CRISPR/Cas9 coding sequence, wherein the CRISPR/Cas9 coding sequence is operably linked with a 3′UTR/miR sequence and a polyadenylation signal. In various embodiments, the CRISPR system targets the BCL11A binding site of the HBG promoter, which can result in γ-globin activation or re-activation. As disclosed herein, the CRISPR system can be self-inactivating, in that cleavage of donor vector by transposition results in degradation of non-integrated donor vector nucleic acids. In various embodiments, a miR sequence can be a sequence that suppresses Cas9 expression in a producer cell during HDAd35 donor vector production (see, e.g., Saydaminova et al., Mol. Ther. Meth. Clin. Dev. 1: 14057, 2015; Li et al., Mol. Ther. Meth. Clin. Dev. 9: 390-401, 2018).

[0511] In various embodiments, an Ad35 system of the present disclosure further includes an Ad35 support vector, where the support vector includes, optionally from 5′ to 3′, (a) a recombines gene including an EF1α promoter operably linked with a FLPe recombinase coding sequence, and (b) a transposase gene including a PGK promoter operably linked with an SB100x transposase coding sequence.

[0512] In various embodiments an Ad35 payload is present in an Ad35 donor vector genome. In various embodiments an Ad35 payload present in an Ad35 donor vector genome is flanked by Ad35 ITRs. In various embodiments, an Ad35 donor vector genome is present in an Ad35 donor vector. In various embodiments, the donor vector is an Ad35++ vector.

[0513] In various embodiments a support genome includes Ad35 ITRs. In various embodiments, a support genome is present in an Ad35 vector. In various embodiments, the support vector is an Ad35++ vector.

[0514] In various embodiments, an Ad35 donor vector is a helper dependent donor vector (HDAd35). In certain such embodiments, systems of the present disclosure can include an HDAd35 donor vector or genome, and Ad35 helper vector or genome, and in various embodiments can further include an Ad35 support vector.

[0515] Certain exemplary embodiments are illustrated in FIG. 166.

[0516] (iv) In various embodiments, an Ad35 payload includes an integration element flanked by transposase inverted repeats for transposition by SB100x, and the transposase inverted repeats are flanked by frt direct repeats for recombination by an FLP recombinase such as FLPe. In various embodiments, the integration element includes, optionally from 5′ to 3′, (a) a β-globin mini-LCR, (b) a gene including a β-globin promoter operably linked with a human γ-globin coding sequence, which γ-globin coding sequence is operably linked with a 3′UTR (e.g., a γ-globin 3′UTR), where the β-globin mini-LCR is also operably linked with the γ-globin coding sequence (c) a cHS4 insulator sequence, and (d) a gene including a promoter such as a PGK promoter operably linked with an MGMT^{P140K} coding sequence, a 2A self-cleaving peptide, a GFP fluorescent marker coding sequence, and a polyadenylation signal, optionally where any of (a)-(d) can be encoded in a 5′ to 3′ orientation on either of the two strands of an Ad35 payload.

[0517] In various embodiments, an Ad35 payload further includes, outside of the integration element and outside of the recombinase sites, a nucleic acid sequence encoding a base editing system. In certain particular embodiments, the nucleic acid sequence encoding a base editing system includes, optionally from 5′ to 3′, (a) a first gRNA gene including a first U6 promoter operably linked with a first gRNA-encoding sequence, where the first gRNA targets bcl11a enhancer, (b) a second gRNA gene including a second U6 promoter operably linked with a second gRNA-encoding sequence, where the second gRNA targets an HBG promoter, and (c) a base editing enzyme gene including a promoter such as an EF1α promoter operably linked with a base editing enzyme coding sequence, wherein the base editing enzyme coding sequence is operably linked with a 3′UTR/miR sequence and a polyadenylation signal. In various embodiments, the base editing system targets the erythroid bcl11a enhancer and the BCL11A binding site of the HBG promoter, each of which contributes to causing γ-globin activation or re-activation. As disclosed herein, the base editing system can be self-inactivating, in that cleavage of donor vector by transposition results in degradation of non-integrated donor vector nucleic acids. In various embodiments, a miR sequence can be a sequence that suppresses Cas9 expression in a producer cell during HDAd35 donor vector production (see, e.g., Saydaminova et al., Mol. Ther. Meth. Clin. Dev. 1: 14057, 2015; Li et al., Mol. Ther. Meth. Clin. Dev. 9: 390-401, 2018).

[0518] In various embodiments, an Ad35 system of the present disclosure further includes an Ad35 support vector, where the support vector includes, optionally from 5′ to 3′, (a) a recombines gene including an EF1α promoter operably linked with a FLPe recombinase coding sequence, and (b) a transposase gene including a PGK promoter operably linked with an SB100x transposase coding sequence.

[0519] In various embodiments an Ad35 payload is present in an Ad35 donor vector genome. In various embodiments an Ad35 payload present in an Ad35 donor vector genome is flanked by Ad35 ITRs. In various embodiments, an Ad35 donor vector genome is present in an Ad35 donor vector. In various embodiments, the donor vector is an Ad35++ vector.

[0520] In various embodiments a support genome includes Ad35 ITRs. In various embodiments, a support genome is present in an Ad35 vector. In various embodiments, the support vector is an Ad35++ vector.

[0521] In various embodiments, an Ad35 donor vector is a helper dependent donor vector (HDAd35). In certain such embodiments, systems of the present disclosure can include an HDAd35 donor vector or genome, and Ad35 helper vector or genome, and in various embodiments can further include an Ad35 support vector.

[0522] (v) In various embodiments, an Ad35 payload includes an integration element flanked by transposase inverted repeats for transposition by SB100x, and the transposase inverted repeats are flanked by frt direct repeats for recombination by an FLP recombinase such as FLPe. In various embodiments, the integration element includes, optionally from 5′ to 3′, (a) a β-globin mini-LCR, (b) a gene including a β-globin promoter operably linked with a rhesus γ-globin coding sequence, which γ-globin coding sequence is operably linked with a 3′UTR (e.g., a γ-globin 3′UTR), where the β-globin mini-LCR is also operably linked with the γ-globin coding sequence (c) a cHS4 insulator sequence, and (d) a gene including a PGK promoter operably linked with an MGMT^{P140K} coding sequence, where the MGMT^{P140K} coding sequence is operably linked with a polyadenylation signal, optionally where any of (a)-(d) can be encoded in a 5′ to 3′ orientation on either of the two strands of an Ad35 payload.

[0523] In various embodiments, an Ad35 payload further includes, outside of the integration element and outside of the recombinase sites, a nucleic acid sequence encoding a base editing system. In certain particular embodiments, the nucleic acid sequence encoding a base editing system includes, optionally from 5′ to 3′, (a) a gRNA gene including a U6 promoter operably linked with a gRNA-encoding sequence, where the gRNA targets an HBG promoter, and (b) a base editing enzyme gene including an EF1α promoter operably linked with a base editing enzyme coding sequence, wherein the base editing enzyme coding sequence is operably linked with a 3′UTR/miR sequence and a polyadenylation signal. In various embodiments, the base editing system targets the BCL11A binding site of the HBG promoter, which can result in γ-globin activation or re-activation. As disclosed herein, the base editing system can be self-inactivating, in that cleavage of donor vector by transposition results in degradation of non-integrated donor vector nucleic acids. In various embodiments, a miR sequence can be a sequence that suppresses Cas9 expression in a producer cell during HDAd35 donor vector production (see, e.g., Saydaminova et al., Mol. Ther. Meth. Clin. Dev. 1: 14057, 2015; Li et al., Mol. Ther. Meth. Clin. Dev. 9: 390-401, 2018).

[0524] In various embodiments, an Ad35 system of the present disclosure further includes an Ad35 support vector, where the support vector includes, optionally from 5′ to 3′, (a) a recombines gene including an EF1α promoter operably linked with a FLPe recombinase coding sequence, and (b) a transposase gene including a PGK promoter operably linked with an SB100x transposase coding sequence.

[0525] In various embodiments an Ad35 payload is present in an Ad35 donor vector genome. In various embodiments an Ad35 payload present in an Ad35 donor vector genome is flanked by Ad35 ITRs. In various embodiments, an Ad35 donor vector genome is present in an Ad35 donor vector. In various embodiments, the donor vector is an Ad35++ vector.

[0526] In various embodiments a support genome includes Ad35 ITRs. In various embodiments, a support genome is present in an Ad35 vector. In various embodiments, the support vector is an Ad35++ vector.

[0527] In various embodiments, an Ad35 donor vector is a helper dependent donor vector (HDAd35). In certain such embodiments, systems of the present disclosure can include an HDAd35 donor vector or genome, and Ad35 helper vector or genome, and in various embodiments can further include an Ad35 support vector.

### I(C)(ii). Payload Regulatory Sequences

### I(C)(ii)(a). Promoter Regulatory Sequences

[0528] A promoter can be a non-coding genomic DNA sequence, usually upstream (5′) to the relevant coding sequence, to which RNA polymerase binds before initiating transcription. This binding aligns the RNA polymerase so that transcription will initiate at a specific transcription initiation site. The nucleotide sequence of the promoter determines the nature of the enzyme and other related protein factors that attach to it and the rate of RNA synthesis. The RNA is processed to produce messenger RNA (mRNA) which serves as a template for translation of the RNA sequence into the amino acid sequence of the encoded polypeptide. The 5′ non-translated leader sequence is a region of the mRNA upstream of the coding region that may play a role in initiation and translation of the mRNA. The 3′ transcription termination/polyadenylation signal is a non-translated region downstream of the coding region that functions in the plant cell to cause termination of the RNA synthesis and the addition of polyadenylate nucleotides to the 3′ end.

[0529] Promoters can include general promoters, tissue-specific promoters, cell-specific promoters, and/or promoters specific for the cytoplasm. Promoters may include strong promoters, weak promoters, constitutive expression promoters, and/or inducible (conditional) promoters. Inducible promoters direct or control expression in response to certain conditions, signals, or cellular events. For example, the promoter may be an inducible promoter that requires a particular ligand, small molecule, transcription factor, hormone, or hormone protein in order to effect transcription from the promoter. Particular examples of promoters include the AFP (α-fetoprotein) promoter, amylase 1C promoter, aquaporin-5 (AP5) promoter, αl-antitrypsin promoter, β-act promoter, β-globin promoter, β-Kin promoter, B29 promoter, CCKAR promoter, CD14 promoter, CD43 promoter, CD45 promoter, CD68 promoter, CEA promoter, c-erbB2 promoter, COX-2 promoter, CXCR4 promoter, desmin promoter, E2F-1 promoter, human elongation factor Iα promoter (EFIα), CMV (cytomegalovirus viral) promoter, minCMV promoter, SV40 (simian virus 40) immediately early promoter, EGR1 promoter, eIF4A1 promoter, elastase-1 promoter, endoglin promoter, FerH promoter, FerL promoter, fibronectin promoter, Flt-1 promoter, GAPDH promoter, GFAP promoter, GPIIb promoter, GRP78 promoter, GRP94 promoter, HE4 promoter, hGR1/1 promoter, hNIS promoter, Hsp68 promoter, the Hsp68 minimal promoter (proHSP68), HSP70 promoter, HSV-1 virus TK gene promoter, hTERT promoter, ICAM-2 promoter, kallikrein promoter, LP promoter, major late promoter (MLP), Mb promoter, Rho promoter, MT (metallothionein) promoter, MUC1 promoter, Nphsl promoter, OG-2 promoter, PGK (Phospho Glycerate kinase) promoters, PGK-1 promoter, polymerase III (Pol III) promoter, PSA promoter, ROSA promoter, SP-B promoter, Survivn promoter, SYN1 promoter, SYT8 gene promoter, TRP1 promoter, Tyr promoter, ubiquitin B promoter, WASP promoter, and the Rous Sarcoma Virus (RSV) long-terminal repeat (LTR) promoter

[0530] Promoters may be obtained as native promoters or composite promoters. Native promoters, or minimal promoters, refer to promoters that include a nucleotide sequence from the 5′ region of a given gene. A native promoter includes a core promoter and its natural 5′UTR. In particular embodiments, the 5′UTR includes an intron. Composite promoters refer to promoters that are derived by combining promoter elements of different origins or by combining a distal enhancer with a minimal promoter of the same or different origin.

[0531] In particular embodiments, the SV40 promoter includes the sequence set forth in SEQ ID NO: 80. In particular embodiments, the dESV40 promoter (SV40 promoter with deletion of the enhancer region) includes the sequence set forth in SEQ ID NO: 81. In particular embodiments, the human telomerase catalytic subunit (hTERT) promoter includes the sequence set forth in SEQ ID NO: 82. In particular embodiments, the RSV promoter derived from the Schmidt-Ruppin A strain includes the sequence set forth in SEQ ID NO: 83. In particular embodiments, the hNIS promoter includes the sequence set forth in SEQ ID NO: 84. In particular embodiments, the human glucocorticoid receptor 1A (hGR 1/Ap/e) promoter includes the sequence set forth in SEQ ID NO: 85.

[0532] In particular embodiments, promoters include wild type promoter sequences and sequences with optional changes (including insertions, point mutations or deletions) at certain positions relative to the wild-type promoter. In particular embodiments, promoters vary from naturally occurring promoters by having 1 change per 20 nucleotide stretch, 2 changes per 20 nucleotide stretch, 3 changes per 20 nucleotide stretch, 4 changes per 20 nucleotide stretch, or 5 changes per 20 nucleotide stretch. In particular embodiments, the natural sequence will be altered in 1, 2, 3, 4, 5, 6, 7, 8, 9, or 10 bases. The promoter may vary in length, including from 50 nucleotides of LTR sequence to 100, 200, 250 or 350 nucleotides of LTR sequence, with or without other viral sequence.

[0533] Some promoters are specific to a tissue or cell and some promoters are non-specific to a tissue or cell. Each gene in mammalian cells has its own promoter and some promoters can only be activated in certain cell types. A non-specific promoter, or ubiquitous promoter, aids in initiation of transcription of a gene or nucleotide sequence that is operably linked to the promoter sequence in a wide range of cells, tissues and cell cycles. In particular embodiments, the promoter is a non-specific promoter. In particular embodiments, a non-specific promoter includes CMV promoter, RSV promoter, SV40 promoter, mammalian elongation factor 1a (EF1a) promoter, β-act promoter, EGR1 promoter, eIF4A1 promoter, FerH promoter, FerL promoter, GAPDH promoter, GRP78 promoter, GRP94 promoter, HSP70 promoter, β-Kin promoter, PGK-1 promoter, ROSA promoter, and/or ubiquitin B promoter.

[0534] A specific promoter aids in cell specific expression of a nucleotide sequence that is operably linked to the promoter sequence. In particular embodiments, a specific promoter is active in a B cells, monocytic cells, leukocytes, macrophages, pancreatic acinar cells, endothelial cells, astrocytes, and/or any other cell type or cell cycle. In particular embodiments, the promoter is a specific promoter. In particular embodiments, an SYT8 gene promoter regulates gene expression in human islets (Xu, et al., Nat Struct Mol Biol., 2011, 18: 372-378). In particular embodiments, kallikrein promoter regulates gene expression in ductal cell specific salivary glands. In particular embodiments, the amylase 1C promoter regulates gene expression in acinar cells. In particular embodiments, the aquaporin-5 (AP5) promoter regulates gene expression in acinar cells (Zheng and Baum, Methods Mol Biol., 434: 205-219, 2008). In particular embodiments, the B29 promoter regulates gene expression in B cells. In particular embodiments, the CD14 promoter regulates gene expression in monocytic cells. In particular embodiments, the CD43 promoter regulates gene expression in leukocytes and platelets. In particular embodiments, the CD45 promoter regulates gene expression in hematopoietic cells. In particular embodiments, the CD68 promoter regulates gene expression in macrophages. In particular embodiments, the desmin promoter regulates gene expression in muscle cells. In particular embodiments, the elastase-1 promoter regulates gene expression in pancreatic acinar cells. In particular embodiments, the endoglin promoter regulates gene expression in endothelial cells. In particular embodiments, the fibronectin promoter regulates gene expression in differentiating cells or healing tissue. In particular embodiments, the Flt-1 promoter regulates gene expression in endothelial cells. In particular embodiments, the GFAP promoter regulates gene expression in astrocytes. In particular embodiments, the GPllb promoter regulates gene expression in megakaryocytes. In particular embodiments, the ICAM-2 promoter regulates gene expression in endothelial cells. In particular embodiments, the Mb promoter regulates gene expression in muscle. In particular embodiments, the Nphsl promoter regulates gene expression in podocytes. In particular embodiments, the OG-2 promoter regulates gene expression in osteoblasts, odontoblasts. In particular embodiments, the SP-B promoter regulates gene expression in lung cells. In particular embodiments, the SYN1 promoter regulates gene expression in neurons. In particular embodiments, the WASP promoter regulates gene expression in hematopoietic cells.

[0535] In particular embodiments, the promoter is a tumor-specific promoter. In particular embodiments, the AFP promoter regulates gene expression in hepatocellular carcinoma. In particular embodiments, the CCKAR promoter regulates gene expression in pancreatic cancer. In particular embodiments, the CEA promoter regulates gene expression in epithelial cancers. In particular embodiments, the c-erbB2 promoter regulates gene expression in breast and pancreas cancer. In particular embodiments, the COX-2 promoter regulates gene expression in tumors. In particular embodiments, the CXCR4 promoter regulates gene expression in tumors. In particular embodiments, the E2F-1 promoter regulates gene expression in tumors. In particular embodiments, the HE4 promoter regulates gene expression in tumors. In particular embodiments, the LP promoter regulates gene expression in tumors. In particular embodiments, the MUC1 promoter regulates gene expression in carcinoma cells. In particular embodiments, the PSA promoter regulates gene expression in prostate and prostate cancers. In particular embodiments, the Survivn promoter regulates gene expression in tumors. In particular embodiments, the TRP1 promoter regulates gene expression in melanocytes and melanoma. In particular embodiments, the Tyr promoter regulates gene expression in melanocytes and melanoma.

### I(C)(ii)(b). LCR Regulatory Sequences

[0536] Locus control regions are operationally defined by their ability to enhance the expression of linked genes to physiological levels in a tissue-specific and copy number-dependent manner at ectopic chromatin sites. Li et al., Blood, 2002, 100(9): 3077-3086.

[0537] The β-globin LCR is exemplary of at least some LCRs in at least several respects. For example, like many other LCRs, the β-globin LCR enhances expression (e.g., increased transcription, increased translation, and/or increased cell or tissue specificity) of operably linked genes or transgenes and includes DNAse hypersensitive (HS) regions understood by those of skill in the art to mediate the expression effects of the LCR. In addition, like many other LCRs, the β-globin LCR can be utilized in whole or in part, e.g., in that it can be utilized in nucleic acids that include a β-globin LCR sequence that includes all of the β-globin LCR HS regions (HSI-HS5) or includes a subset of the β-globin LCR HS regions (e.g., HSI-HS4).

[0538] An exemplary nucleic acid sequence for the Homo sapiens β-globin region on chromosome 11 is provided at GenBank Accession Number NG_000007. A β-globin long LCR can, in some instances, be or include a sequence located 6 to 22 kb 5′ to the first (embryonic) globin gene in the locus. A β-globin long LCR can include 5 DNAse I hypersensitive sites, 5′HSs 1 to 5. Li et al., Blood, 2002, 100(9): 3077-3086. NG_000007 provides the location of the restriction sites that delineate the DNAse I hypersensitive sites HSI, HS2, HS3, and HS4 within the Locus Control Region (e.g., the SnaBI and BstXI restriction sites of HS2, the HindIII and BamHI restriction sites of HS3, and the BamHI and BanII restriction sites of HS4), and is incorporated herein by reference in its entirety and particularly with respect to hyper sensitive site positions. The sequence and position of HSI is described, for example, by Pasceri et al., Ann NY Acad. Sci. 850:377-381, 1998; Pasceri et al., Blood. 92:653-663, 1998; and Milot et al., Cell. 87:105-114, 1996. In particular embodiments, the HS2 region extends from position 16,671 to 17,058 of the Locus Control Region. The SnaBI and BstXI restriction sites of HS2 are located at positions 17,093 and 16,240, respectively. The HS3 region extends from position 12,459 to 13,097 of the Locus Control Region. The BamHI and HindIII restriction sites of HS3 are located at positions 12,065 and 13,360, respectively. The HS4 region extends from position 9,048 to 9,713 of the Locus Control Region. The BamHI and BanII restriction sites of HS4 are located at positions 8,496 and 9,576 respectively.

[0539] Particular embodiments disclosed herein utilize mini-portions of the β-globin LCR. Mini-portions include less than all 5 HS regions, such as HS1, HS2, HS3, HS4, and/or HS5, so long as the LCR does not include all 5 segments of the β-globin LCR. The 4.3 kb HS1-HS4 LCR utilized in Example 1 of the disclosure provides one example of a mini-LCR. Other mini-LCR can include, for example, HS1, HS2, and HS3; HS2, HS3, and HS4; HS3, HS4, and HS5; HS1, HS3, and HS5; HS1, HS2, and HS5; and HS1, HS4, and HS5. For additional examples of mini-LCR, see Sadelain et al., Proc. Nat. Acad. Sci. (USA) 92: 6728-6732, 1995; and Lebouich et al., EMBO J. 13: 3065-3076, 1994. Particular embodiments can utilize a mini-β-globin LCR in combination with a β-globin promoter. In particular embodiments, this combination yields a 5.9 kb LCR-promoter combination. In relation to LCR, “mini” and “micro” are used interchangeably herein.

[0540] Particular embodiments disclosed herein utilize long portions of the locus control region (LCR). A long β-globin LCR can include HS1, HS2, HS3, HS4, and HS5. In particular embodiments, a long LCR includes an 21.5 kb sequence including HS1, HS2, HS3, HS4, and HS5 of the β-globin LCR. A long β-globin LCR can be coupled with the β-globin promoter to drive high protein expression levels.

[0541] Particular embodiments can include as a long β-globin LCR positions 5292319-5270789 (21,531 bp) of human chromosome 11 (SEQ ID NO: 185) as enumerated in GRCh38. In various embodiments, a long LCR can have a total length equal to or greater than, 18 kb, 18.5 kb, 19 kb, 19.5 kb, 20 kb, 20.5 kb, 21 kb, 21.5 kb, or 21.531 kb. In various embodiments, a long LCR can have a total length equal to or greater than 70%, 75%, 80%, 85%, 90%, 91%, 92%, 93%, 94%, 95%, 96%, 97%, 98%, or 99% of the length of SEQ ID NO: 185. In various embodiments, a long LCR can include at least 18 kb, 18.5 kb, 19 kb, 19.5 kb, 20 kb, 20.5 kb, 21 kb, or 21.5 kb of SEQ ID NO: 185. In any of the various embodiments provided herein, a long LCR can be or include a nucleic acid having at least 70%, 75%, 80%, 85%, 90%, 91%, 92%, 93%, 94%, 95%, 96%, 97%, 98%, or 99% identity with a corresponding contiguous portion of SEQ ID NO: 185. In any of the various embodiments provided herein, a long LCR can include HS1, HS2, HS3, HS4, and HS5.

[0542] In various embodiments, an Ad35 vector system can include, e.g., a transposable transgene insert that includes positions 5228631-5227023 (1609 bp) of human chromosome 11 or 5228631-5227018 (1614 bp) (SEQ ID NO: 186) as enumerated in GRCh38 as a β-globin promoter. In various embodiments, a β-globin promoter can have a total length equal to or greater than, e.g., 1.0 kb, 1.1. kb, 1.2 kb, 1.3 kb, 1.4 kb, 1.5 kb, 1.6 kb, or 1.609 kb. In various embodiments, a β-globin promoter can include at least 1.0 kb, 1.1. kb, 1.2 kb, 1.3 kb, 1.4 kb, 1.5 kb, 1.6 kb, or 1.609 kb of SEQ ID NO: 186. In various embodiments, the transposable transgene insert can include positions 5228631-5227023 (1609 bp) of human chromosome 11. In various embodiments, a β-globin promoter can include a total length equal to or greater than, e.g., 100 bp, 200 bp, 300 bp, 400 bp, 500 bp, 1 kb, 1.5 kb, 2 kb, 2.5 kb, 3 kb, 4 kb, or 5 kb of a nucleic acid sequence upstream of, e.g., immediately upstream of the first coding nucleotide of, a gene whose expression is regulated by the β-globin LCR, including without limitation any of epsilon (HBE1), G-gamma (HBG2), A-gamma (HBG1), delta (HBD), and beta (HBB) globin genes and/or one or more genes present in the hemoglobin β locus (11:5,225,463-5,227,070, complement). In various embodiments, a β-globin promoter can include a total length equal to or greater than, e.g., 100 bp, 200 bp, 300 bp, 400 bp, 500 bp, 1 kb, 1.5 kb, 2 kb, 2.5 kb, 3 kb, 4 kb, or 5 kb of a nucleic acid sequence upstream, e.g., immediately upstream, of Chromosome 11 NC_000011.10 position 5227021. In various embodiments, a β-globin promoter can have a total length equal to or greater than 70%, 75%, 80%, 85%, 90%, 91%, 92%, 93%, 94%, 95%, 96%, 97%, 98%, or 99% of the length of SEQ ID NO: 186. In any of the various embodiments provided herein, a β-globin promoter can be or include a nucleic acid having a sequence having at least 70%, 75%, 80%, 85%, 90%, 91%, 92%, 93%, 94%, 95%, 96%, 97%, 98%, or 99% identity with a corresponding contiguous portion of SEQ ID NO: 186.

[0543] In various embodiments, a β-globin LCR, such as a long β-globin LCR, causes expression of an operably linked coding sequence in erythrocytes. In various embodiments, the operably linked coding sequence is also operably linked with a β-globin promoter as set forth herein or otherwise known in the art.

[0544] The immunoglobulin heavy chain locus B cell LCR is an exemplary LCR that enhances expression (e.g., increases transcription, increases translation, and/or increases cell or tissue specificity) of operably linked coding sequences. Expression of a coding sequence can be enhanced when operably linked to a immunoglobulin heavy chain locus B cell LCR that includes the complete immunoglobulin heavy chain locus B cell LCR sequence and/or that includes an expression-regulatory fragment thereof. The immunoglobulin heavy chain locus B cell LCR includes DNAse hypersensitive sites (HS) understood by those of skill in the art to mediate at least some of the expression-enhancing effects of the immunoglobulin heavy chain locus B cell LCR. The immunoglobulin heavy chain locus B cell LCR includes four DNase I-hypersensitive sites (HS1, HS2, HS3, and HS4) in the 3′Ca region of the immunoglobulin heavy chain (IgH) locus functions as an enhancer-locus control region (LCR). Accordingly, a immunoglobulin heavy chain locus B cell LCR can be a complete immunoglobulin heavy chain locus B cell LCR including all of HS1-HS4, or can be an expression-regulatory fragment thereof that includes a subset of the hypersensitive sites HS1-HS4. These HS sites map to 10-30 kb of the IgH C gene and can cause lymphoid cell-specific and developmentally regulated enhancer elements in transient transfection assays. It has been observed that this nucleic acid sequence can direct a similar pattern of expression when linked to c-myc genes in Burkitt Lymphoma and plasmacytoma cell lines. In Burkitt Lymphomas and plasmacytomas, control of c-myc by the B-cell LCR occurs because of characteristic chromosome translocations that cause c-myc genes to become juxtaposed with the IgH sequences, thereby resulting in aberrant c-myc transcription. Additional description of the B Cell LCR can be found, for example, in Madisen et al., Mol Cell Biol. 18(11):6281-92, 1998; Giannini et al, J. Immunol. 150:1772-1780, 1993; Madisen & Groudine, Genes Dev. 8:2212-2226, 1994; and Michaelson et al., Nucleic Acids Res. 23:975-981, 1995.

[0545] Expression constructs can additionally include features that enhance the stability of mRNA transcripts, for example, insulators, and/or polyA tails.

### I(C)(ii)(c). Micro RNA Site Regulatory Sequences

[0546] In various embodiments, a microRNA (or miRNA) control system can refer to a method or composition in which expression of a gene is regulated by the presence of microRNA sites (e.g., nucleic acid sequences with which a microRNA can interact). In various embodiments, the present disclosure includes an Ad35 donor vector that includes a payload in which a nucleic acid sequence encoding an expression product is operably linked to an miRNA target site such that expression of the expression product is controlled by presence, level, activity, and/or contact with a corresponding miRNA. In various embodiments, the miRNA site is a target site for an miRNA selected from any of miR423-5, miR423-5p, miR42-2, miR181c, miR125a, miR15a, miR187, and/or miR218. For the avoidance of doubt the present disclosure contemplates that a nucleic acid sequence operably linked with an miRNA site, e.g., as disclosed herein can be a nucleic acid sequence that encodes, e.g., any of one or more expression products provided herein.

[0547] In particular embodiments, a microRNA control system regulated expression of a gene such that the gene is expressed exclusively in target cells, such as HSPCs e.g., tumor infiltrating HSPCs. In some embodiments, a nucleic acid (e.g., a therapeutic gene) encoding a protein or nucleic acid of interest (e.g., an anti-cancer agent such as a CAR, TCR, antibody, and/or checkpoint inhibitor, e.g., an αPD-L1 antibody (e.g., an αPD-L1γ1 antibody) that is a checkpoint inhibitor) includes, is associated with, or is operably linked with a microRNA site, a plurality of same microRNA sites, or a plurality of distinct microRNA sites. While those of skill in the art will be familiar with means and techniques of associating a microRNA site with a nucleic acid or portion thereof having a sequence that encodes a gene of interest, certain non-limiting examples are provided herein. For example, a gene of interest (e.g., a sequence encoding an αPD-L1γ1 antibody) can be present in a nucleic acid such that expression of the gene of interest is regulated by the presence of one or more microRNA sites that suppress expression in cells that are not tumor-infiltrating leukocyte cells, but do not suppress expression in tumor-infiltrating leukocytes. In certain particular examples, a gene of interest (e.g., a sequence encoding an αPD-L1γ1 antibody) can be present in a nucleic acid such that expression of the gene of interest is regulated by the presence of one or more miR423-5p microRNA sites that suppress expression in cells that are not tumor-infiltrating leukocyte cells, but do not suppressed expression in tumor-infiltrating leukocytes. In various embodiments, a microRNA control system can include a nucleic acid that includes, or in which expression of a protein or nucleic acid of interest is regulated by, one or more microRNA sites, e.g., 1, 2, 3, 4, 5, 6, 7, 8, 9, 10, or more microRNA sites. In various embodiments, a microRNA control system can include a nucleic acid that includes, or in which expression of a protein or nucleic acid of interest is regulated by, one or more miR423-5p microRNA sites, e.g., 1, 2, 3, 4, 5, 6, 7, 8, 9, 10, or more miR423-5p microRNA sites. In some particular embodiments, a microRNA control system can include a nucleic acid that encodes αPD-L1γ1 antibody and includes, or in which expression of αPD-L1γ1 antibody is regulated by, one or more miR423-5p microRNA sites, e.g., 1, 2, 3, 4, 5, 6, 7, 8, 9, 10, or more miR423-5p microRNA sites, e.g., miR423-5p microRNA sites.

[0548] In various embodiments, a microRNA site can be a sequence that suppresses expression of an operably linked coding sequence in a producer cell during HDAd35 donor vector production, e.g., a coding sequence encoding a CRISPR enzyme, base editing enzyme, or gRNA (see, e.g., Saydaminova et al., Mol. Ther. Meth. Clin. Dev. 1: 14057, 2015; Li et al., Mol. Ther. Meth. Clin. Dev. 9: 390-401, 2018).

### I(C)(iii). Selection Sequences

[0549] In particular embodiments vectors include a selection element including a selection cassette. In particular embodiments, a selection cassette includes a promoter, a cDNA that adds or confers resistance to a selection agent, and a poly A sequence enabling stopping the transcription of this independent transcriptional element.

[0550] A selection cassette can encode one or more proteins that (a) confer resistance to antibiotics or other toxins, (b) complement auxotrophic deficiencies, or (c) supply critical nutrients not available from complex media, e.g., the gene encoding D-alanine racemase for Bacilli. Any number of selection systems may be used to recover transformed cell lines. In particular embodiments, a positive selection cassette includes resistance genes to neomycin, hygromycin, ampicillin, puromycin, phleomycin, zeomycin, blasticidin, viomycin. In particular embodiments, a positive selection cassette includes the DHFR (dihydrofolate reductase) gene providing resistance to methotrexate, the MGMT^{P140K} gene responsible for the resistance to O⁶BG/BCNU, the HPRT (Hypoxanthine phosphoribosyl transferase) gene responsible for the transformation of specific bases present in the HAT selection medium (aminopterin, hypoxanthine, thymidine) and other genes for detoxification with respect to some drugs. In particular embodiments, the selection agent includes neomycin, hygromycin, puromycin, phleomycin, zeomycin, blasticidin, viomycin, ampicillin, O⁶BG/BCNU, methotrexate, tetracycline, aminopterin, hypoxanthine, thymidine kinase, DHFR, Gln synthetase, or ADA.

[0551] In particular embodiments, negative selection cassettes include a gene for transformation of a substrate present in the culture medium into a toxic substance for the cell that expresses the gene. These molecules include detoxification genes of diphtheria toxin (DTA) (Yagi et al., Anal Biochem. 214(1):77-86, 1993; Yanagawa et al., Transgenic Res. 8(3):215-221, 1999), the kinase thymidine gene of the Herpes virus (HSV TK) sensitive to the presence of ganciclovir or FIAU. The HPRT gene may also be used as a negative selection by addition of 6-thioguanine (6TG) into the medium. and for all positive and negative selections, a poly A transcription termination sequence from different origins, the most classical being derived from SV40 poly A, or a eukaryotic gene poly A (bovine growth hormone, rabbit β-globin, etc.).

[0552] In particular embodiments, the selection cassette includes MGMT^{P140K} as described in Olszko et al. (Gene Therapy 22: 591-595, 2015). In particular elements, the selection agent includes O⁶BG/BCN U.

[0553] The drug resistant gene MGMT encoding human alkyl guanine transferase (hAGT) is a DNA repair protein that confers resistance to the cytotoxic effects of alkylating agents, such as nitrosoureas and temozolomide (TMZ). 6-benzylguanine (6-BG) is an inhibitor of AGT that potentiates nitrosourea toxicity and is co-administered with TMZ to potentiate the cytotoxic effects of this agent. Several mutant forms of MGMT that encode variants of AGT are highly resistant to inactivation by 6-BG but retain their ability to repair DNA damage (Maze et al., J. Pharmacol. Exp. Ther. 290: 1467-1474, 1999). MGMT^{P140K}-based drug resistant gene therapy has been shown to confer chemoprotection to mouse, canine, rhesus macaques, and human cells, specifically hematopoietic cells (Zielske et al., J. Clin. Invest. 112: 1561-1570, 2003; Pollok et al., Hum. Gene Ther. 14: 1703-1714, 2003; Gerull et al., Hum. Gene Ther. 18: 451-456, 2007; Neff et al., Blood 105: 997-1002, 2005; Larochelle et al., J. Clin. Invest. 119: 1952-1963, 2009; Sawai et al., Mol. Ther. 3: 78-87, 2001).

[0554] In particular embodiments, combination with an in vivo selection cassette will be a critical component for diseases without a selective advantage of gene-corrected cells. For example, in SCID and some other immunodeficiencies and FA, corrected cells have an advantage and only transducing the therapeutic gene into a “few” HSPCs is sufficient for therapeutic efficacy. For other diseases like hemoglobinopathies (i.e., sickle cell disease and thalassemia) in which cells do not demonstrate a competitive advantage, in vivo selection of the gene corrected cells, such as in combination with an in vivo selection cassette such as MGMT^{P140K}, will select for the few transduced HSPCs, allowing an increase in the gene corrected cells and in order to achieve therapeutic efficacy. This approach can also be applied to HIV by making HSPCs resistant to HIV in vivo rather than ex vivo genetic modification.

### I(C)(iv). Stuffer Sequences

[0555] In particular embodiments, the vector includes a stuffer sequence. In particular embodiments, the stuffer sequence may be added to render the genome at a size near that of wild-type length. Stuffer is a term generally recognized in the art intended to define functionally inert sequence intended to extend the length

[0556] The stuffer sequence is used to achieve efficient packaging and stability of the vector. In particular embodiments, the stuffer sequence is used to render the genome size between 70% and 110% of that of the wild type virus.

[0557] The stuffer sequences can be any DNA, preferably of mammalian origin. In a preferred embodiment of the invention, stuffer sequences are non-coding sequences of mammalian origin, for example intronic fragments.

[0558] The stuffer sequence, when used to keep the size of the vector a predetermined size, can be any non-coding coding sequence or sequence that allows the genome to remain stable in dividing or nondividing cells. These sequences can be derived from other viral genomes (e.g. Epstein bar virus) or organism (e.g. yeast). For example, these sequences could be a functional part of centromeres and/or telomeres.

### I(C)(v). Payload Integration and Support Vectors

[0559] Gene therapy often requires integration of a desired nucleic acid payload into the genome of a target cell. A variety of systems can be designed and/or used for integration of a payload into a host or target cell genome. Various such systems can include one or more of certain payload sequence features and support vectors and support genomes (support genomes).

[0560] One means of engineering adenoviral vectors that integrate a payload into a host cell genome has been to produce integrating viral hybrid vectors. Integrating viral hybrid vectors combine genetic elements of a vector that efficiently transduces target cells with genetic elements of a vector that stably integrates its vector payload. Integration elements of interest, e.g., for use in combination with adenoviral vectors, have included those of bacteriophage integrase PHiC31, retrotransposons, retrovirus (e.g., LTR-mediated or retrovirus integrate-mediated), zinc-finger nuclease, DNA-binding domain-retroviral integrase fusion proteins, AAV (e.g., AAV-ITR or AAV-Rep protein-mediated), and Sleeping Beauty (SB) transposase.

[0561] Ad35 vectors described herein can optionally include transposable elements including transposases and transposons. Transposases can include integrases from retrotransposons or of retroviral origin, as well as an enzyme that is a component of a functional nucleic acid-protein complex capable of transposition and which is mediating transposition. A transposition reaction includes a transposon and a transposase or an integrase enzyme. In particular embodiments, the efficiency of integration, the size of the DNA sequence that can be integrated, and the number of copies of a DNA sequence that can be integrated into a genome can be improved by using such transposable elements. Transposons include a short nucleic acid sequence with terminal repeat sequences upstream and downstream of a larger segment of DNA. Transposases bind the terminal repeat sequences and catalyze the movement of the transposon to another portion of the genome.

[0562] A number of transposases have been described in the art that facilitate insertion of nucleic acids into the genome of vertebrates, including humans. Examples of such transposases include sleeping beauty (“SB”, e.g., derived from the genome of salmonid fish); piggyback (e.g., derived from lepidopteran cells and/or the Myotis lucifugus); mariner (e.g., derived from Drosophila); frog prince (e.g., derived from Rana pipiens); Tol1; Tol2 (e.g., derived from medaka fish); TcBuster (e.g., derived from the red flour beetle Tribolium castaneum), Helraiser, Himarl, Passport, Minos, Ac/Ds, PIF, Harbinger, Harbinger3-DR, HSmar1, and spinON.

[0563] The PiggyBac (PB) transposase is a compact functional transposase protein that is described in, for example, Fraser et al., Insect Mol. Biol., 1996, 5, 141-51; Mitra et al., EMBO J., 2008, 27, 1097-1109; Ding et al., Cell, 2005, 122, 473-83; and U.S. Pat. Nos. 6,218,185; 6,551,825; 6,962,810; 7,105,343; and 7,932,088. Hyperactive piggyBac transposases are described in U.S. Pat. No. 10,131,885.

[0564] In particular embodiments, PB transposase has the sequence as set forth in SEQ ID NO: 291 (GenBank ABS12111.1).

[0565] In particular embodiments, a Frog Prince transposase has the sequence as set forth in SEQ ID NO: 292 (GenBank: AAP49009.1). See also US2005/0241007.

[0566] In particular embodiments, a TcBuster transposase has the sequence as set forth in SEQ ID NO: 293 (GenBank: ABF20545.1).

[0567] In particular embodiments, a Tol2 transposase has the sequence set forth in SEQ ID NO: 294 (GenBank: BAA87039.1).

[0568] Additional information on DNA transposons can be found, for instance, in Muñoz-López & Garcia Pérez, Curr Genomics, 11(2):115-128, 2010.

[0569] Sleeping Beauty is described in Ivics et al. Cell 91, 501-510, 1997; Izsvak et al., J. Mol. Biol., 302(1):93-102, 2000; Geurts et al., Molecular Therapy, 8(1): 108-117, 2003; Mates et al. Nature Genetics 41:753-761, 2009; and U.S. Pat. Nos. 6,489,458; 7,148,203; and 7,160,682; US Publication Nos. 2011/117072; 2004/077572; and 2006/252140. In certain embodiments, the Sleeping Beauty transposase enzyme has the sequence SEQ ID NO: 73. In particular embodiments, the Hyperactive Sleeping Beauty (SB100x) transposase enzyme has the sequence SEQ ID NO: 74.

[0570] Systematic mutagenesis studies have been undertaken to increase the activity of the SB transposase. For example, Yant et al., undertook the systematic exchange of the N-terminal 95 AA of the SB transposase for alanine (Mol. Cell Biol. 24: 9239-9247, 2004). Ten of these substitutions caused hyperactivity between 200-400% as compared to SB10 as a reference. SB16, described in Baus et al. (Mol. Therapy 12: 1148-1156, 2005) was reported to have a 16-fold activity increase as compared to SB10. Additional hyperactive SB variants are described in Zayed et al. (Molecular Therapy 9(2):292-304, 2004) and U.S. Pat. No. 9,840,696.

[0571] SB transposons need to circularize in order to transpose (Yant et al., Nature Biotechnology, 20: 999-1005, 2002). Furthermore, there is an inverse linear relationship, for transposons between 1.9 and 7.2 kb, between the length of the transposon and transposition frequency. In other words, SB transposase mediate the delivery of larger transposons less efficiently compared to smaller transposons (Geurts et al., Mol Ther., 8(1):108-17, 2003).

[0572] SB transposases transpose nucleic acid transposon payloads that are positioned between SB ITRs. Various SB ITRs are known in the art. In some embodiments, an SB ITR is a 230 bp sequence including imperfect direct repeats of 32 bp in length that serve as recognition signals for the transposase. Engineered SB ITRs are known in the art, including SB ITRs known as pT, pT2, pT3, pT2B, and pT4. In some embodiments, pT4 ITRs are used, e.g., to flank a transposon payload of the present disclosure, e.g., for transposition by an SB100x transposase.

[0573] In particular embodiments, the sequence encoding the IR(inverted repeat)/DR(direct repeat) and chromosomal sequence of Sleeping Beauty includes SEQ ID NO: 4. In particular embodiments, the sequence encoding the IR/DR and chromosomal sequence of Sleeping Beauty includes SEQ ID NO: 5. In particular embodiments, the IR/DR encoding sequence of Sleeping Beauty includes SEQ ID NO: 295. In particular embodiments, the sequence encoding the IR/DR and chromosomal sequence of Sleeping Beauty includes SEQ ID NO: 296. In particular embodiments, the sequence encoding the IR/DR and chromosomal sequence of Sleeping Beauty includes SEQ ID NO: 297. In particular embodiments, the sequence encoding the IR/DR of Sleeping Beauty includes SEQ ID NO: 298. In particular embodiments, the sequence encoding the IR/DR and chromosomal sequence of Sleeping Beauty includes SEQ ID NO: 299. In particular embodiments, the sequence encoding the IR/DR of Sleeping Beauty includes SEQ ID NO: 300.

[0574] In various embodiments, an Ad35 donor vector or genome includes a payload that includes SB100x transposon inverted repeats that flank an integration element that includes at least one coding sequence that encodes a β-globin expression product or a γ-globin expression product.

[0575] In various embodiments, an adenoviral transposition system includes an Ad35 donor vector or genome that includes an integration element flanked by transposon inverted repeats, and can further include an adenoviral support vector or support genome. In various embodiments, a support vector includes (i) the adenoviral capsid; and (ii) an adenoviral support genome including a nucleic acid sequence encoding a transposase that corresponds to the inverted repeats that flank the integration element. Accordingly, in various embodiments, at least one function of a support vector or support genome can be to encode, express, and/or deliver to a target cell a transposase for transposition of an integration element present in a donor vector administered to the target cell. For instance, in some embodiments, an Ad35 donor vector or genome includes SB100x transposon inverted repeats that flank an integration element that includes at least one coding sequence that encodes a β-globin expression product or a γ-globin expression product, and a support vector or support genome includes a coding sequence that encodes SB100x transposase. In certain embodiments, an integration element is flanked by recombinase direct repeats, e.g., where the integration element is flanked by transposon inverted repeats and the transposon inverted repeats are flanked by recombinase direct repeats. In certain such embodiments, at least one function of a support vector or support genome can be to encode, express, and/or delivery to a target cell a recombinase for recombination of recombinase sites present in a donor vector administered to the target cell. In various embodiments, a support vector or support genome can encode, express, and/or delivery to a target cell a recombinase for recombination of recombinase sites present in a donor vector administered to the target cell and also encode, express, and/or deliver to a target cell a transposase for transposition of an integration element present in a donor vector administered to the target cell.

[0576] Particular embodiments disclosed herein also use site-specific recombinase systems. In these embodiments, in addition to at least one therapeutic gene, the transposon including transposase-recognized inverted repeats also includes at least one recombinase-recognized site. Thus, in particular embodiments, The present disclosure also provides methods of integrating a therapeutic gene into the genome including administering: (a) a transposon including the therapeutic gene, wherein the therapeutic gene is flanked by (i) an inverted repeat sequence recognized by a transposase and (ii) a recombinase-recognized site; and b) a transposase and recombinase that serve to excise the therapeutic gene from a plasmid, episome, or transgene and integrate the therapeutic gene into the genome. In some embodiments, the protein(s) of (b) are administered as a nucleic acid encoding the protein(s). In some embodiments, the transposon and the nucleic acids encoding the protein(s) of (b) are present on separate vectors. In some embodiments, the transposon and nucleic acid encoding the protein(s) of (b) are present on the same vector. When present on the same vector, the portion of the vector encoding the protein(s) of (b) are located outside the portion carrying the transposon of (a). In other words, the transposase and/or recombinase encoding region is located external to the region flanked by the inverted repeats and/or recombinase-recognition site. In the aforementioned methods, the transposase protein recognizes the inverted repeats that flank an inserted nucleic acid, such as a nucleic acid that is to be inserted into a target cell genome. The use of recombinases and recombinase-recognized sites can increase the size of a transposon that can be integrated into a genome further.

[0577] Examples of recombinase systems include the Flp/Frt system, the Cre/loxP system, the Dre/rox system, the Vika/vox system, and the PhiC31 system.

[0578] The Flp/Frt DNA recombinase system was isolated from Saccharomyces cerevisiae. The Flp/Frt system includes the recombinase Flp (flippase) that catalyzes DNA-recombination on its Frt recognition sites. In particular embodiments, Flp (flippase) includes the sequence SEQ ID NO: 75 and the FRT recognition site includes SEQ ID NO: 76.

[0579] Variants of the Flp protein include SEQ ID NO: 77 (GenBank: ABD57356.1) and SEQ ID NO: 78 (GenBank: ANW61888.1).

[0580] The Cre/loxP system is described in, for example, EP 0220000961. Cre is a site-specific DNA recombinase isolated from bacteriophage P1. In particular embodiments, Cre includes the sequence SEQ ID NO: 79.

[0581] The recognition site of the Cre protein is a nucleotide sequence of 34 base pairs, the loxP site (SEQ ID NO: 80). Cre recombines the 34 bp loxP DNA sequence by binding to the 13 base pair inverted repeats and catalyzing strand cleavage and re-ligation within the spacer region. The staggered DNA cuts made by Cre in the spacer region are separated by 6 base pairs to give an overlap region that acts as a homology sensor to ensure that only recombination sites having the same overlap region recombine. Variants of the lox recognition site that can also be used include: 1ox2272 (SEQ ID NO: 81); lox511 (SEQ ID NO: 82); 1ox66 (SEQ ID NO: 83); lox71 (SEQ ID NO: 84); loxM2 (SEQ ID NO: 85); and 1ox5171 (SEQ ID NO: 86).

[0582] The VCre/VIoxP recombinase system was isolated from Vibrio plasmid p0908. In particular embodiments, the VCre recombinase of this system includes SEQ ID NO: 87 and the VloxP recognition site includes SEQ ID NO: 88.

[0583] The sCre/SloxP system is described in WO 2010/143606. The Dre/rox system is described in U.S. Pat. Nos. 7,422,889 and 7,915,037B2. It generally includes a Dre recombinase isolated from Enterobacteria phage D6 with the sequence SEQ ID NO: 89 and the rox recognition site (SEQ ID NO: 90).

[0584] The Vika/vox system is described in U.S. Pat. No. 10,253,332. Additionally, the PhiC31 recombinase recognizes the AttB/AttP binding sites.

[0585] The amount of vector nucleic acid including the transposon (including inverted repeats and/or recombinase recognition sites), and in many embodiments the amount of vector nucleic acid encoding the transposase and/or recombinase, are introduced into the cell is sufficient to provide for the desired excision and insertion of the transposon nucleic acid into the target cell genome. As such, the amount of vector nucleic acid introduced should provide for a sufficient amount of transposase activity and/or recombinase activity and a sufficient copy number of the transposon that is desired to be inserted into the target cell genome. Particular embodiments include a 1:1; 1:2; or 1:3 ratio of transposon to transposase/recombinase.

[0586] The subject methods result in stable integration of the nucleic acid into the target cell genome. By stable integration is meant that the nucleic acid remains present in the target cell genome for more than a transient period of time and is passed on a part of the chromosomal genetic material to the progeny of the target cell.

[0587] Example 2 of the current disclosure describes the surprising result that the hyperactive Sleeping Beauty transposase can be used to integrate a 32.4 kb transposon into the genome of HSPC. These embodiments include the use of SBX100 in combination with the Flp/Frt system as depicted in FIG. 23.

[0588] As indicated previously, particular embodiments utilize homology arms to facilitate targeted insertion of genetic constructs utilizing homology directed repair. Homology arms can be any length with sufficient homology to a genomic sequence at a cleavage site, e.g. 70%, 80%, 85%, 90%, 95%, or 100% homology with the nucleotide sequences flanking the cleavage site, e.g., within 50 bases or less of the cleavage site, e.g., within 30 bases, within 15 bases, within 10 bases, within 5 bases, or immediately flanking the cleavage site, to support HDR between it and the genomic sequence to which it bears homology. Homology arms are generally identical to the genomic sequence, for example, to the genomic region in which the double stranded break (DSB) occurs. However, as indicated, absolute identity is not required.

[0589] Particular embodiment can utilize homology arms with 25, 50, 100, or 200 nucleotides (nt), or more than 200 nt of sequence homology between a homology-directed repair template and a targeted genomic sequence (or any integral value between 10 and 200 nucleotides, or more). In particular embodiments, homology arms are 40-1000 nt in length. In particular embodiments, homology arms 500-2500 base pairs, 700-2000 base pairs, or 800-1800 base pairs. In particular embodiments, homology arms include at least 800 base pairs or at least 850 base pairs. The length of homology arms can also be symmetric or asymmetric.

[0590] Particular embodiment can utilize first and/or second homology arms each including at least 25, 50, 100, 200, 400, 600, 800, 1,000, 1,200, 1,400, 1,600, 1,800, 2,000, 2,500, or 3,000 nucleotides or more, having sequence identity or homology with a corresponding fragment of a target genome. In some embodiments, first and/or second homology arms each include a number of nucleotides having sequence identity or homology with a corresponding fragment of a target genome that has a lower bound of 25, 50, 100, 200, 400, 600, 800, 1,000, 1,200, 1,400, 1,600, or 1,800 nucleotides and an upper bound of 1,000, 1,200, 1,400, 1,600, 1,800, 2,000, 2,500, or 3,000 nucleotides. In some embodiments, first and/or second homology arms each include a number of nucleotides having sequence identity or homology with a corresponding fragment of a target genome that is between 40 and 1,000 nucleotides, between 500 and 2,500 nucleotides, between 700 and 2,000 nucleotides, or between 800 and 1800 nucleotides, or that has a length of at least 800 nucleotides or at least 850 nucleotides. First and second homology arms can have same, similar, or different lengths.

[0591] For additional information regarding homology arms, see Richardson et al., Nat Biotechnol. 34(3):339-44, 2016.

[0592] In particular embodiments, genetic constructs (e.g., genes leading to expression of a therapeutic product within a cell) are precisely inserted within genomic safe harbors. Genomic safe harbor sites are intragenic or extragenic regions of the genome that are able to accommodate the predictable expression of newly integrated DNA without adverse effects on the host cell. A useful safe harbor must permit sufficient transgene expression to yield desired levels of the encoded protein. A genomic safe harbor site also must not alter cellular functions. Methods for identifying genomic safe harbor sites are described in Sadelain et al., Nature Reviews 12:51-58, 2012; and Papapetrou et al., Nat Biotechnol. 29(1):73-8, 2011. In particular embodiments, a genomic safe harbor site meets one or more (one, two, three, four, or five) of the following criteria: (i) distance of at least 50 kb from the 5′ end of any gene, (ii) distance of at least 300 kb from any cancer-related gene, (iii) within an open/accessible chromatin structure (measured by DNA cleavage with natural or engineered nucleases), (iv) location outside a gene transcription unit and (v) location outside ultraconserved regions (UCRs), microRNA or long non-coding RNA of the genome.

[0593] In particular embodiments, to meet the criteria of a genomic safe harbor, chromatin sites must be >150 kb away from a known oncogene, >30 kb away from a known transcription start site; and have no overlap with coding mRNA. In particular embodiments, to meet the criteria of a genomic safe harbor, chromatin sites must be >200 kb away from a known oncogene, >40 kb away from a known transcription start site; and have no overlap with coding mRNA. In particular embodiments, to meet the criteria of a genomic safe harbor, chromatin sites must be >300 kb away from a known oncogene, >50 kb away from a known transcription start site; and have no overlap with coding mRNA. In particular embodiments, a genomic safe harbor meets the preceding criteria (>150 kb, >200 kb or >300 kb away from a known transcription start site; and have no overlap with coding mRNA >40 kb, or >50 kb away from a known transcription start site with no overlap with coding mRNA) and additionally is 100% homologous between an animal of a relevant animal model and the human genome to permit rapid clinical translation of relevant findings.

[0594] In particular embodiments, a genomic safe harbor meets criteria described herein and also demonstrates a 1:1 ratio of forward:reverse orientations of lentiviral integration further demonstrating the loci does not impact surrounding genetic material.

[0595] Particular genomic safe harbors sites include CCR5, HPRT, AAVS1, Rosa and albumin. See also, e.g., U.S. Pat. Nos. 7,951,925 and 8,110,379; U.S. Publication Nos. 2008/0159996; 2010/00218264; 2012/0017290; 2011/0265198; 2013/0137104; 2013/0122591; 2013/0177983 and 2013/0177960 for additional information and options for appropriate genomic safe harbor integration sites.

[0596] Various technologies known in the art can be used to direct integration of an integration element at specific genomic loci such as genomic safe harbors. For example AAV-mediated gene targeting, as well as homologous recombination enhanced by the introduction of DNA double-strand breaks using site-specific endonucleases (zinc-finger nucleases, meganucleases, transcription activator-like effector (TALE) nucleases), and CRISPR/Cas systems are all tools that can mediate targeted insertion of foreign DNA at predetermined genomic loci such as genomic safe harbors. Immunosuppression regimens are described, e.g., in U.S. Provisional Application No. 63/009,218, which is incorporated herein by reference in its entirety and in particular with respect to immunosuppression regimens.

[0597] In certain embodiments, integration of an integration element at specific genomic loci such as genomic safe harbors can include homology-directed integration using CRISPR enzyme-mediated cleavage of a target genome. CRISPR enzyme (e.g., Cas9) cleaves double stranded DNA at a site specified by a guide RNA (gRNA). The double strand break can be repaired by homology-directed repair (HDR) when a donor template (such as an Ad35 payload integration element including left and right homology arms) is present. In various such methods, an integration element is a “repair template” in that it includes left and right homology arms (e.g., of 500-3,000 bp) for insertion into a cleaved target genome. CRISPR-mediated gene insertion can be several orders of magnitude more efficient compared with spontaneous recombination of DNA template, demonstrating that CRISPR-mediated gene insertion can be an effective tool for genome editing. Exemplary methods of homology-directed integration of a nucleic acid sequence into a specified genomic locus are known in the art, e.g., in Richardson et al. (Nat Biotechnol. 34(3):339-44, 2016).

[0598] In various embodiments, an adenoviral donor vector including an integration element for insertion at a genomic safe harbor of a target cell genome can cause integration of a nucleic acid sequence having a length of up to 15 kb. In various embodiments, an integration element for integration into a target cell genome at a genomic safe harbor can have a length of at least 1 kb, 2 kb, 3 kb, 4 kb, 5 kb, 6 kb, 7 kb, 8 kb, 9 kb, 10 kb, 11 kb, 12 kb, 13 kb, 14 kb, or 15 kb, e.g., where the length has a lower bound of 1 kb, 2 kb, 3 kb, 4 kb, or 5 kb and an upper bound of 10 kb, 11 kb, 12 kb, 13 kb, 14 kb, or 15 kb.

### II. TARGET CELL POPULATIONS

[0599] In various embodiments, Ad35 donor vectors and genomes of the present disclosure can transduce target cells of any of a variety of types, including without limitation HSCs, T cells, B cells, and tumor cells disclosed herein.

### II(A). HSCs

[0600] In particular embodiments, vector-targeted cell types include hematopoietic stem cells (HSCs). HSCs are targeted for in vivo genetic modification by binding CD46. As indicated, within the current disclosure, HSC are targeted for in vivo genetic modification by binding CD46. Vectors can include mutations disclosed herein to increase the specificity and/or strength of CD46 binding. HSC can also be identified by the following marker profiles: CD34+, Lin-CD34+CD38-CD45RA-CD9O+CD49f+(HSC1) and CD34+CD38-CD45RA-CD90− CD49f+ (HSC2). Human HSC1 can be identified by the following profiles: CD34+/CD38-/CD45RA-/CD90+ or CD34+/CD45RA-/CD90+ and mouse LT-HSC can be identified by Lin-Scal+ckit+CD150+CD48-F1t3-CD34− (where Lin represents the absence of expression of any marker of mature cells including CD3, Cd4, CD8, CD11 b, CD11 c, NK1.1, Gr1, and TER119). In particular embodiments, HSC are identified by a CD164+ profile. In particular embodiments, HSC are identified by a CD34+/CD164+ profile. For additional information regarding HSC marker profiles, see WO2017/218948.

### II(B). T Cells

[0601] Several different subsets of T-cells have been discovered, each with a distinct function. For example, a majority of T-cells have a T-cell receptor (TCR) existing as a complex of several proteins. The actual T-cell receptor is composed of two separate peptide chains, which are produced from the independent T-cell receptor alpha and beta (TCRα and TCRβ) genes and are called α- and β-TCR chains.

[0602] γδ T-cells represent a small subset of T-cells that possess a distinct T-cell receptor (TCR) on their surface. In γδ T-cells, the TCR is made up of one γ-chain and one δ-chain. This group of T-cells is much less common (2% of total T-cells) than the αβ T-cells.

[0603] CD3 is expressed on all mature T cells. Activated T-cells express 4-1BB (CD137), CD69, and CD25. CD5 and transferrin receptor are also expressed on T-cells.

[0604] T-cells can further be classified into helper cells (CD4+ T-cells) and cytotoxic T-cells (CTLs, CD8+ T-cells), which include cytolytic T-cells. T helper cells assist other white blood cells in immunologic processes, including maturation of B cells into plasma cells and activation of cytotoxic T-cells and macrophages, among other functions. These cells are also known as CD4+ T-cells because they express the CD4 protein on their surface. Helper T-cells become activated when they are presented with peptide antigens by MHC class II molecules that are expressed on the surface of antigen presenting cells (APCs). Once activated, they divide rapidly and secrete small proteins called cytokines that regulate or assist in the active immune response.

[0605] Cytotoxic T-cells destroy virally infected cells and tumor cells, and are also implicated in transplant rejection. These cells are also known as CD8+ T-cells because they express the CD8 glycoprotein on their surface. These cells recognize their targets by binding to antigen associated with MHC class I, which is present on the surface of nearly every cell of the body.

[0606] In particular embodiments, CARs are genetically modified to be expressed in cytotoxic T-cells.

[0607] “Central memory” T-cells (or “TCM”) as used herein refers to an antigen experienced CTL that expresses CD62L or CCR7 and CD45RO on the surface thereof, and does not express or has decreased expression of CD45RA as compared to naive cells. In particular embodiments, central memory cells are positive for expression of CD62L, CCR7, CD25, CD127, CD45RO, and CD95, and have decreased expression of CD45RA as compared to naive cells.

[0608] “Effector memory” T-cell (or “TEM”) as used herein refers to an antigen experienced T-cell that does not express or has decreased expression of CD62L on the surface thereof as compared to central memory cells and does not express or has decreased expression of CD45RA as compared to a naive cell. In particular embodiments, effector memory cells are negative for expression of CD62L and CCR7, compared to naive cells or central memory cells, and have variable expression of CD28 and CD45RA. Effector T-cells are positive for granzyme B and perforin as compared to memory or naive T-cells.

[0609] “Naive” T-cells as used herein refers to a non-antigen experienced T cell that expresses CD62L and CD45RA and does not express CD45RO as compared to central or effector memory cells. In particular embodiments, naive CD8+ T lymphocytes are characterized by the expression of phenotypic markers of naive T-cells including CD62L, CCR7, CD28, CD127, and CD45RA.

### II(C). B Cells

[0610] B cells are mediators of the humoral response and are responsible for production and release of antibodies specific to an antigen. Several types of B cells exist which can be characterized by key markers. In general, immature B cells express CD19, CD20, CD34, CD38, and CD45R, and as they mature the key expressed markers are CD19 and IgM.

### II(D). Tumors

[0611] In particular embodiments, vectors can target tumors. In particular embodiments, tumors are targeted by targeting receptors present on tumor cells and not on healthy cells. Tumors can be targeted for in vivo genetic modification by binding αv integrins. The αv integrins play an important role in angiogenesis. The αvβ3 and αvβ5 integrins are absent or expressed at low levels in normal endothelial cells but are induced in angiogenic vasculature of tumors (Brooks et al., Cell, 79: 1157-1164, 1994; Hammes et al., Nature Med, 2: 529-533, 1996). Aminopeptidase N/CD13 has recently been identified as an angiogenic receptor for the NGR motif (Burg et al., Cancer Res, 59:2869-74, 1999). Aminopeptidase N/CD13 is strongly expressed in the angiogenic blood vessels of cancer and in other angiogenic tissues.

[0612] In particular embodiments, vectors can target tumors by targeting cancer cell antigen epitopes. Cancer cell antigens are expressed by cancer cells or tumors.

[0613] In particular embodiments, cancer cell antigen epitopes are preferentially expressed by cancer cells. “Preferentially expressed” means that a cancer cell antigen is found at higher levels on cancer cells as compared to other cell types. In some instances, a cancer antigen epitope is only expressed by the targeted cancer cell type. In other instances, the cancer antigen is expressed on the targeted cancer cell type at least 25%, 35%, 45%, 55%, 65%, 75%, 85%, 95%, 96%, 97%, 98%, 99%, or 100% more than on non-targeted cells.

[0614] In particular embodiments, cancer cell antigens are significantly expressed on cancerous and healthy tissue. In particular embodiments, significantly expressed means that the use of a bi-specific antibody was stopped during development based on on-target/off-cancer toxicities. In particular embodiments, significantly expressed means the use of a bi-specific antibody requires warnings regarding potential negative side effects based on on-target/off-cancer toxicities. As one example, cetuximab is anti-EGFR antibody associated with a severe skin rash thought to be due to EGFR expression in the skin. Another example is Herceptin (trastuzumab), which is an anti-HER2 (ERBB2) antibody. Herceptin is associated with cardiotoxicity due to target expression in the heart. Moreover, targeting Her2 with a CAR-T cell was lethal in a patient due to on-target, off-cancer expression in the lung.

[0615] Table 12 provides examples of cancer antigens that are more likely to be co-expressed in particular cancer types.

TABLE 12

| Cancer Antigens Likely to be Co-Expressed | Cancer Type |
|---|---|
| CD19, CD20, CD22, ROR1, CD33, CD56, | Leukemia/Lymphoma |
| CLL-1, WT-1, CD123, PD-L1, EFGR | |
| B-cell maturation antigen (BCMA), PD-L1, | Multiple Myeloma |
| EFGR | |
| PSMA, WT1, Prostate Stem Cell antigen | Prostate Cancer |
| (PSCA), SV40 T, PD-L1, EFGR | |
| HER2, ERBB2, ROR1, PD-L1, EFGR, | Breast Cancer |
| MUC16, folate receptor (FOLR), CEA | |
| CD133, PD-L1, EFGR | Stem Cell Cancer |
| L1-CAM, MUC16, FOLR, Lewis Y, ROR1, | Ovarian Cancer |
| mesothelin, WT-1, PD-L1, EFGR, CD56 | |
| mesothelin, PD-L1, EFGR | Mesothelioma |
| carboxy-anhydrase-IX (CAIX); PD-L1, EFGR | Renal Cell Carcinoma |
| GD2, PD-L1, EFGR | Melanoma |
| mesothelin, CEA, CD24, ROR1, PD-L1, | Pancreatic Cancer |
| EFGR, MUC16 | |
| ROR1, PD-L1, EFGR, mesothelin, MUC16, | Lung Cancer |
| FOLR, CEA, CD56 | |
| mesothelin, PD-L1, EFGR | Cholangiocarcinoma |
| MUC16, PD-L1, EFGR, | Bladder Cancer |
| ROR1, glypican-2, CD56, disialoganglioside, | Neuroblastoma |
| PD-L1, EFGR, | |
| CEA, PD-L1, EFGR, | Colorectal Cancer |
| CD56, PD-L1, EFGR, | Merkel Cell Carcinoma |

[0616] In more particular examples, cancer cell antigens include: Mesothelin, MUC16, FOLR, PD-L1, ROR1, glypican-2 (GPC2), disialoganglioside (GD2), HER2, EGFR, EGFRvIII, CEA, CD56, CLL-1, CD19, CD20, CD123, CD30, CD33 (full length), CD33 (DeltaE2 variant), CD33 (with C-terminal truncation), BCMA, IGFR, MUC1, VEGFR, PSMA, PSCA, IL13Ra2, FAP, EpCAM, CD44, CD133, Tro-2, CD200, FLT3, GCC, and VVT1. As will be understood by one of ordinary skill in the art, targeted antigens can lack signal peptides.

[0617] CD56, also known as neural cell adhesion molecule 1 (NCAM1), is a type I membrane glycoprotein involved in cell-cell and cell-matrix adhesion. Its extracellular domain has five IgG-like domains at the N-terminus and two fibronectin type III domains in the membrane-proximal region.

[0618] Disialoganglioside GalAcbeta1-4(NeuAcalpha2-8NeuAcalpha2-3)Galbeta1-4Glcbeta1-1Cer (GD2) is expressed on various tumors, including neuroblastoma. The disialoganglioside antigen GD2 includes a backbone of oligosaccharides flanked by sialic acid and lipid residues. See, e.g., Cheresh (Surv. Synth. Pathol. Res. 4:97, 1987) and U.S. Pat. No. 5,653,977.

[0619] EGFR variant III (EGFRvIII), a tumor specific mutant of EGFR, is a product of genomic rearrangement which is often associated with wild-type EGFR gene amplification. EGFRvIII is formed by an in-frame deletion of exons 2-7, leading to deletion of 267 amino acids with a glycine substitution at the junction. The truncated receptor loses its ability to bind ligands but acquires constitutive kinase activity. Interestingly, EGFRvIII frequently co-expresses with full length wild-type EGFR in the same tumor cells. Moreover, EGFRvIII expressing cells exhibit increased proliferation, invasion, angiogenesis and resistance to apoptosis.

[0620] EGFRvIII is most often found in glioblastoma multiforme (GBM). It is estimated that 25-35% of GBM carries this truncated receptor. Moreover, its expression often reflects a more aggressive phenotype and poor prognosis. Besides GBM, expression of EGFRvIII has also been reported in other solid tumors such as non-small cell lung cancer, head and neck cancer, breast cancer, ovarian cancer and prostate cancer. In contrast, EGFRvIII is not expressed in healthy tissues.

[0621] In particular embodiments, a targeted cancer antigen epitope can have high expression by a targeted cancer cell or tumor or low expression by a targeted cancer cell or tumor. In particular embodiments, high and low expression can be determined using flow cytometry or fluorescence-activated cell-sorting (FACS). As is understood by one of ordinary skill in the art of flow cytometry, “hi”, “lo”, “+” and “−” refer to the intensity of a signal relative to negative or other populations. In particular embodiments, positive expression (+) means that the marker is detectable on a cell using flow cytometry. In particular embodiments, negative expression (−) means that the marker is not detectable using flow cytometry. In particular embodiments, “hi” means that the positive expression of a marker of interest is brighter as measured by fluorescence (using for example FACS) than other cells also positive for expression. In these embodiments, those of ordinary skill in the art recognize that brightness is based on a threshold of detection. Generally, one of skill in the art will analyze a negative control tube first, and set a gate (bitmap) around the population of interest by FSC and SSC and adjust the photomultiplier tube voltages and gains for fluorescence in the desired emission wavelengths, such that 97% of the cells appear unstained for the fluorescence marker with the negative control. Once these parameters are established, stained cells are analyzed, and fluorescence recorded as relative to the unstained fluorescent cell population. In particular embodiments, and representative of a typical FACS plot, hi implies to the farthest right (x line) or highest top line (upper right or left) while lo implies within the left lower quadrant or in the middle between the right and left quadrant (but shifted relative to the negative population). In particular embodiments, “hi” refers to greater than 20-fold of +, greater than 30-fold of +, greater than 40-fold of +, greater than 50-fold of +, greater than 60-fold of +, greater than 70-fold of +, greater than 80-fold of +, greater than 90-fold of +, greater than 100-fold of +, or more of an increase in detectable fluorescence relative to + cells. Conversely, “lo” can refer to a reciprocal population of those defined as “hi”.

### II(E). Other Targets

[0622] In addition to HSCs, T Cells, B Cells, and tumors (or cancer cells), vectors can target other antigens for bacteria and fungi.

[0623] Antigens targeting bacteria can be derived from, for example, anthrax, gram-negative bacilli, Chlamydia, diphtheria, Helicobacter pylori, Mycobacterium tuberculosis, pertussis toxin, pneumococcus, rickettsiae, Staphylococcus, Streptococcus and tetanus.

[0624] As particular examples of bacterial antigen markers, anthrax antigens include anthrax protective antigen; gram-negative bacilli antigens include lipopolysaccharides; diptheria antigens include diphtheria toxin; Mycobacterium tuberculosis antigens include mycolic acid, heat shock protein 65 (HSP65), the 30 kDa major secreted protein and antigen 85A; pertussis toxin antigens include hemagglutinin, pertactin, FIM2, FIM3 and adenylate cyclase; pneumococcal antigens include pneumolysin and pneumococcal capsular polysaccharides; rickettsiae antigens include rompA; streptococcal antigens include M proteins; and tetanus antigens include tetanus toxin.

[0625] Antigens targeting fungi can be derived from, for example, Candida, coccidiodes, Cryptococcus, Histoplasma, Leishmania, Plasmodium, protozoa, parasites, schistosomae, tinea, Toxoplasma, and Trypanosoma cruzi.

[0626] As particular examples of fungal antigens, coccidiodes antigens include spherule antigens; cryptococcal antigens include capsular polysaccharides; Histoplasma antigens include heat shock protein 60 (HSP60); Leishmania antigens include gp63 and lipophosphoglycan; Plasmodium falciparum antigens include merozoite surface antigens, sporozoite surface antigens, circumsporozoite antigens, gametocyte/gamete surface antigens, protozoal and other parasitic antigens including the blood-stage antigen pf 155/RESA; schistosomae antigens include glutathione-S-transferase and paramyosin; tinea fungal antigens include Trichophyton; Toxoplasma antigens include SAG-1 and p30; and Trypanosoma cruzi antigens include the 75-77 kDa antigen and the 56 kDa antigen.

### III. DOSAGES, FORMULATIONS, AND ADMINISTRATION

[0627] A vector can be formulated such that it is pharmaceutically acceptable for administration to cells or animals, e.g., to humans. A vector may be administered in vitro, ex vivo, or in vivo. The Ad35 viral vector vectors described herein can be formulated for administration to a subject. Formulations include an Ad35 viral vector associated with a therapeutic gene (“active ingredient”) and one or more pharmaceutically acceptable carriers.

[0628] As disclosed herein, a vector can be in any form known in the art. Such forms include, e.g., liquid, semi-solid and solid dosage forms, such as liquid solutions (e.g., injectable and infusible solutions), dispersions or suspensions, tablets, pills, powders, liposomes and suppositories.

[0629] Selection or use of any particular form may depend, in part, on the intended mode of administration and therapeutic application. For example, compositions containing a composition intended for systemic or local delivery can be in the form of injectable or infusible solutions. Accordingly, a vector can be formulated for administration by a parenteral mode (e.g., intravenous, subcutaneous, intraperitoneal, or intramuscular injection). As used herein, parenteral administration refers to modes of administration other than enteral and topical administration, usually by injection, and include, without limitation, intravenous, intranasal, intraocular, pulmonary, intramuscular, intraarterial, intrathecal, intracapsular, intraorbital, intracardiac, intradermal, intrapulmonary, intraperitoneal, transtracheal, subcutaneous, subcuticular, intraarticular, subcapsular, subarachnoid, intraspinal, epidural, intracerebral, intracranial, intracarotid and intracisternal injection and infusion. A parenteral route of administration can be, for example, administration by injection, transnasal administration, transpulmonary administration, or transcutaneous administration. Administration can be systemic or local by intravenous injection, intramuscular injection, intraperitoneal injection, subcutaneous injection.

[0630] In various embodiments, a vector of the present invention can be formulated as a solution, microemulsion, dispersion, liposome, or other ordered structure suitable for stable storage at high concentration. Sterile injectable solutions can be prepared by incorporating a composition described herein in the required amount in an appropriate solvent with one or a combination of ingredients enumerated above, as required, followed by filter sterilization. Generally, dispersions are prepared by incorporating a composition described herein into a sterile vehicle that contains a basic dispersion medium and the required other ingredients from those enumerated above. In the case of sterile powders for the preparation of sterile injectable solutions, methods for preparation include vacuum drying and freeze-drying that yield a powder of a composition described herein plus any additional desired ingredient (see below) from a previously sterile-filtered solution thereof. The proper fluidity of a solution can be maintained, for example, by the use of a coating such as lecithin, by the maintenance of the required particle size in the case of dispersion and by the use of surfactants. Prolonged absorption of injectable compositions can be brought about by including in the composition a reagent that delays absorption, for example, monostearate salts, and gelatin.

[0631] A vector can be administered parenterally in the form of an injectable formulation including a sterile solution or suspension in water or another pharmaceutically acceptable liquid. For example, the vector can be formulated by suitably combining the therapeutic molecule with pharmaceutically acceptable vehicles or media, such as sterile water and physiological saline, vegetable oil, emulsifier, suspension agent, surfactant, stabilizer, flavoring excipient, diluent, vehicle, preservative, binder, followed by mixing in a unit dose form required for generally accepted pharmaceutical practices. The amount of vector included in the pharmaceutical preparations is such that a suitable dose within the designated range is provided. Nonlimiting examples of oily liquid include sesame oil and soybean oil, and it may be combined with benzyl benzoate or benzyl alcohol as a solubilizing agent. Other items that may be included are a buffer such as a phosphate buffer, or sodium acetate buffer, a soothing agent such as procaine hydrochloride, a stabilizer such as benzyl alcohol or phenol, and an antioxidant. The formulated injection can be packaged in a suitable ampule.

[0632] In various embodiments, subcutaneous administration can be accomplished by means of a device, such as a syringe, a prefilled syringe, an auto-injector (e.g., disposable or reusable), a pen injector, a patch injector, a wearable injector, an ambulatory syringe infusion pump with subcutaneous infusion sets, or other device for subcutaneous injection.

[0633] In some embodiments, a vector described herein can be therapeutically delivered to a subject by way of local administration. As used herein, “local administration” or “local delivery,” can refer to delivery that does not rely upon transport of the vector or vector to its intended target tissue or site via the vascular system. For example, the vector may be delivered by injection or implantation of the composition or agent or by injection or implantation of a device containing the composition or agent. In certain embodiments, following local administration in the vicinity of a target tissue or site, the composition or agent, or one or more components thereof, may diffuse to an intended target tissue or site that is not the site of administration.

[0634] In some embodiments, the compositions provided herein are present in unit dosage form, which unit dosage form can be suitable for self-administration. Such a unit dosage form may be provided within a container, typically, for example, a vial, cartridge, prefilled syringe or disposable pen. A doser such as the doser device described in U.S. Pat. No. 6,302,855, may also be used, for example, with an injection system as described herein.

[0635] Pharmaceutical forms of vector formulations suitable for injection can include sterile aqueous solutions or dispersions. A formulation can be sterile and must be fluid to allow proper flow in and out of a syringe. A formulation can also be stable under the conditions of manufacture and storage. A carrier can be a solvent or dispersion medium containing, for example, water and saline or buffered aqueous solutions. Preferably, isotonic agents, for example, sugars or sodium chloride can be used in the formulations.

[0636] In addition, one skilled in the art may also contemplate additional delivery method may be via electroporation, sonophoresis, intraosseous injections methods or by using gene gun. Vectors may also be implanted into microchips, nano-chips or nanoparticles.

[0637] A suitable dose of a vector described herein can depend on a variety of factors including, e.g., the age, sex, and weight of a subject to be treated, the condition or disease to be treated, and the particular vector used. Other factors affecting the dose administered to the subject include, e.g., the type or severity of the condition or disease. Other factors can include, e.g., other medical disorders concurrently or previously affecting the subject, the general health of the subject, the genetic disposition of the subject, diet, time of administration, rate of excretion, drug combination, and any other additional therapeutics that are administered to the subject. A suitable means of administration of a vector can be selected based on the condition or disease to be treated and upon the age and condition of a subject. Dose and method of administration can vary depending on the weight, age, condition, and the like of a patient, and can be suitably selected as needed by those skilled in the art. A specific dosage and treatment regimen for any particular subject can be adjusted based on the judgment of a medical practitioner.

[0638] A vector solution can include a therapeutically effective amount of a composition described herein. Such effective amounts can be readily determined by one of ordinary skill in the art based, in part, on the effect of the administered composition, or the combinatorial effect of the composition and one or more additional active agents, if more than one agent is used. A therapeutically effective amount can be an amount at which any toxic or detrimental effects of the composition are outweighed by therapeutically beneficial effects.

[0639] In various instances, a vector can be formulated to include a pharmaceutically acceptable carrier or excipient. Examples of pharmaceutically acceptable carriers include, without limitation, any and all solvents, dispersion media, coatings, antibacterial and antifungal agents, isotonic and absorption delaying agents, and the like that are physiologically compatible. Compositions of the present invention can include a pharmaceutically acceptable salt, e.g., an acid addition salt or a base addition salt.

[0640] Exemplary generally used pharmaceutically acceptable carriers include any and all absorption delaying agents, antioxidants, binders, buffering agents, bulking agents or fillers, chelating agents, coatings, disintegration agents, dispersion media, gels, isotonic agents, lubricants, preservatives, salts, solvents or co-solvents, stabilizers, surfactants, and/or delivery vehicles.

[0641] In various embodiments, a composition including a vector as described herein, e.g., a sterile formulation for injection, can be formulated in accordance with conventional pharmaceutical practices using distilled water for injection as a vehicle. For example, physiological saline or an isotonic solution containing glucose and other supplements such as D-sorbitol, D-mannose, D-mannitol, and sodium chloride may be used as an aqueous solution for injection, optionally in combination with a suitable solubilizing agent, for example, alcohol such as ethanol and polyalcohol such as propylene glycol or polyethylene glycol, and a nonionic surfactant such as polysorbate 80™, HCO-50 and the like.

[0642] Exemplary antioxidants include ascorbic acid, methionine, and vitamin E.

[0643] Exemplary buffering agents include citrate buffers, succinate buffers, tartrate buffers, fumarate buffers, gluconate buffers, oxalate buffers, lactate buffers, acetate buffers, phosphate buffers, histidine buffers, and/or trimethylamine salts.

[0644] An exemplary chelating agent is EDTA.

[0645] Exemplary isotonic agents include polyhydric sugar alcohols including trihydric or higher sugar alcohols, such as glycerin, erythritol, arabitol, xylitol, sorbitol, or mannitol.

[0646] Exemplary preservatives include phenol, benzyl alcohol, meta-cresol, methyl paraben, propyl paraben, octadecyldimethylbenzyl ammonium chloride, benzalkonium halides, hexamethonium chloride, alkyl parabens such as methyl or propyl paraben, catechol, resorcinol, cyclohexanol, and 3-pentanol.

[0647] Stabilizers refer to a broad category of excipients which can range in function from a bulking agent to an additive which solubilizes the active ingredients or helps to prevent denaturation or adherence to the container wall. Typical stabilizers can include polyhydric sugar alcohols; amino acids, such as arginine, lysine, glycine, glutamine, asparagine, histidine, alanine, ornithine, L-leucine, 2-phenylalanine, glutamic acid, and threonine; organic sugars or sugar alcohols, such as lactose, trehalose, stachyose, mannitol, sorbitol, xylitol, ribitol, myoinositol, galactitol, glycerol, and cyclitols, such as inositol; PEG; amino acid polymers; sulfur-containing reducing agents, such as urea, glutathione, thioctic acid, sodium thioglycolate, thioglycerol, α-monothioglycerol, and sodium thiosulfate; low molecular weight polypeptides (i.e., <10 residues); proteins such as human serum albumin, bovine serum albumin, gelatin or immunoglobulins; hydrophilic polymers such as polyvinylpyrrolidone; monosaccharides such as xylose, mannose, fructose and glucose; disaccharides such as lactose, maltose and sucrose; trisaccharides such as raffinose, and polysaccharides such as dextran. Stabilizers are typically present in the range of from 0.1 to 10,000 parts by weight based on therapeutic weight.

[0648] The formulations disclosed herein can be formulated for administration by, for example, injection. For injection, formulation can be formulated as aqueous solutions, such as in buffers including Hanks' solution, Ringer's solution, or physiological saline, or in culture media, such as Iscove's Modified Dulbecco's Medium (IMDM). The aqueous solutions can include formulatory agents such as suspending, stabilizing, and/or dispersing agents. Alternatively, the formulation can be in lyophilized and/or powder form for constitution with a suitable vehicle, e.g., sterile pyrogen-free water, before use.

[0649] Any formulation disclosed herein can advantageously include any other pharmaceutically acceptable carriers which include those that do not produce significantly adverse, allergic, or other untoward reactions that outweigh the benefit of administration. Exemplary pharmaceutically acceptable carriers and formulations are disclosed in Remington's Pharmaceutical Sciences, 18th Ed. Mack Printing Company, 1990. Moreover, formulations can be prepared to meet sterility, pyrogenicity, general safety, and purity standards as required by US FDA Office of Biological Standards and/or other relevant foreign regulatory agencies.

[0650] In particular embodiments, the formulations include active ingredients of at least 0.1% w/v or w/w of the formulation; at least 1% w/v or w/w of formulation; at least 10% w/v or w/w of formulation; at least 20% w/v or w/w of formulation; at least 30% w/v or w/w of formulation; at least 40% w/v or w/w of formulation; at least 50% w/v or w/w of formulation; at least 60% w/v or w/w of formulation; at least 70% w/v or w/w of formulation; at least 80% w/v or w/w of formulation; at least 90% w/v or w/w of formulations; at least 95% w/v or w/w of formulation; or at least 99% w/v or w/w of formulation.

[0651] The actual dose and amount of an Ad35 viral vector and, in particular embodiments, of an Ad35 viral vector and mobilization factors, administered to a particular subject and concordant mobilization procedure and schedule can be determined by a physician, veterinarian, or researcher taking into account parameters such as physical and physiological factors including target; body weight; type of condition; severity of condition; upcoming relevant events, when known; previous or concurrent therapeutic interventions; idiopathy of the subject; and route of administration, for example. In addition, in vitro and in vivo assays can optionally be employed to help identify optimal dosage ranges.

[0652] Therapeutically effective amounts of Ad35 vector associated with a therapeutic gene can include doses ranging from, for example, 1×10⁷ to 50×10⁸ infection units (IU) or from 5×10⁷ to 20×10⁸ IU. In other examples, a dose can include 5×10⁷ IU, 6×10⁷ IU, 7×10⁷ IU, 8×10⁷ IU, 9×10⁷ IU, 1×10⁸ IU, 2×10⁸ IU, 3×10⁸ IU, 4×10⁸ IU, 5×10⁸ IU, 6×10⁸ IU, 7×10⁸ IU, 8×10⁸ IU, 9×10⁸ IU, 10×10⁸ IU, or more. In particular embodiments, a therapeutically effective amount of an Ad35 vector associated with a therapeutic gene includes 4×10⁸ IU. In particular embodiments, a therapeutically effective amount of an Ad35 vector associated with a therapeutic gene can be administered subcutaneously or intravenously. In particular embodiments, a therapeutically effective amount of an Ad35 vector associated with a therapeutic gene can be administered following administration with one or more mobilization factors.

[0653] In various embodiments of the present disclosure, an in vivo gene therapy includes administration of at least one viral gene therapy vector to a subject in combination with at least one immune suppression regimen. In an in vivo gene therapy including more than one vector species, such as a first vector that is a supported viral gene therapy vector in combination with a second vector that is a support vector, the first vector and the second vector can be administered in a single formulation or dosage form or in two separate formulations or dosage forms. In various embodiments, the first and second vectors can be administered at the same time or at different times, e.g., during the same one-hour period or during non-overlapping one-hour periods. In various embodiments, the first and second vectors can be administered at the same time or at different times, e.g., on the same day or on different days. In various embodiments, the first and second vectors can be administered at the same dosage or at different dosages, e.g., where the dosage is measured as the total number of viral particles or as a number of viral particles per kilogram of the subject. In various embodiments, the first and second vectors can be administered in a pre-defined ratio. In various embodiments, the ratio is in the range of 2:1 to 1:2, e.g., 1:1.

[0654] In various embodiments, a vector is administered to a subject in a single total dose on a single day. In various embodiments a vector is administered in two, three, four, or more unit doses that together constitute a total dose. In various embodiments, one unit dose of a vector is administered to a subject per day on each of one, two, three, four, or more consecutive days. In various embodiments, two unit doses of a vector are administered to a subject per day on each of one, two, three, four, or more consecutive days. Accordingly, in various embodiments, a daily dose can refer to the dose of vector received by a subject over the course of a day. In various embodiments, the term day refers to a twenty-four-hour period, such as a twenty-four-hour period from midnight of a first calendar date to midnight of the next calendar date.

[0655] In various embodiments, a unit dose, daily dose, or total dose of a vector, such as a viral gene therapy vector or support vector, or the total combined dose of a viral gene therapy vector and a support vector, can be at least 1E8, 5E8, 1E9, 5E9, 1E10, 5E10, 1E11, 5E11, 1E12, 5E12, 1E13, 5E13, 1E14, or 1E15 viral particles per kilogram (vp/kg). In various embodiments, a unit dose, daily dose, or total dose of a vector, such as a viral gene therapy vector or support vector, or the total combined dose of a viral gene therapy vector and a support vector, can fall within a range having a lower bound selected from 1E8, 5E8, 1E9, 5E9, 1E10, 5E10, 1E11, 5E11, 1E12, 5E12, 1E13, 5E13, 1E14, or 1E15 vp/kg and an upper bound selected from 1E8, 5E8, 1E9, 5E9, 1E10, 5E10, 1E11, 5E11, 1E12, 5E12, 1E13, 5E13, 1E14, or 1E15 vp/kg.

[0656] In various embodiments, a viral gene therapy vector is administered at a unit dose, daily dose, or total dose of at least 1E10, 5E10, 1E11, 5E11, 1E12, 5E12, 1E13, 5E13, 1E14, or 1E15 vp/kg and a support vector is administered at a unit dose, daily dose, or total dose of at least 1 E8, 5E8, 1E9, 5E9, 1E10, 5E10, 1E11, and 5E11 vp/kg, optionally where the unit dose, daily dose, or total dose of the viral gene therapy vector is within a range having a lower bound selected from 1E10, 5E10, 1E11, 5E11, 1E12, and 5E12, vp/kg and an upper bound selected from 1E11, 5E11, 1E12, 5E12, 1E13, 5E13, 1E14, and 1E15 vp/kg, and/or where the unit dose, daily dose, or total dose of the support vector is within a range having a lower bound selected from 1E8, 5E8, 1E9, 5E9, 1E10, and 5E10 vp/kg and an upper bound selected from 1E9, 5E9, 1E10, 5E10, 1E11, and 5E11 vp/kg.

[0657] In various embodiments, a support vector is administered at a unit dose, daily dose, or total dose of at least 1E10, 5E10, 1E11, 5E11, 1E12, 5E12, 1E13, 5E13, 1E14, or 1E15 vp/kg and a supported viral gene therapy vector is administered at a unit dose, daily dose, or total dose of at least 1E8, 5E8, 1E9, 5E9, 1E1 0, 5E10, 1E11, and 5E11 vp/kg, optionally where the unit dose, daily dose, or total dose of the support vector is within a range having a lower bound selected from 1E10, 5E10, 1E11, 5E11, 1E12, and 5E12, vp/kg and an upper bound selected from 1E11, 5E11, 1E12, 5E12, 1E13, 5E13, 1E14, and 1E15 vp/kg, and/or where the unit dose, daily dose, or total dose of the supported viral gene therapy vector is within a range having a lower bound selected from 1 E8, 5E8, 1E9, 5E9, 1E10, and 5E10 vp/kg and an upper bound selected from 1E9, 5E9, 1E10, 5E10, 1E11, and 5E11 vp/kg. In various embodiments, a supported viral gene therapy vector and a support vector are administered in a pre-defined ratio. In various embodiments, the ratio is in the range of 2:1 to 1:2, e.g., 1:1.

### IV. APPLICATIONS

[0658] Methods and compositions provided herein are disclosed at least in part for use in in vivo gene therapy. However, for the avoidance of doubt, the present disclosure expressly includes the use of compositions and methods provided herein for ex-vivo engineering of cells and/or tissues, as well as in vitro uses including the engineering of cells and/or tissues for research purposes. Gene therapy includes use of a vector, genome, or system of the present disclosure in a method of introducing exogenous DNA into a host cell (such as a target cell) and/or a nucleic acid (such as a target nucleic acid, such as a target genome, e.g., the genome of a target cell). The present disclosure includes description and exemplification of compositions and methods relating to in vivo, in vitro, and ex vivo therapy that those of skill in the art will appreciate that various methods and compositions provided herein are generally applicable to introduction of a nucleic acid payload into a subject, e.g., a host or target cell. Because such compositions and methods are of general utility, e.g., in gene therapy, they are useful both as tools in gene therapy in general and in various particular conditions in particular, including those provided herein.

### IV(A). In Vivo Gene Therapy

[0659] Treatments using in vivo gene therapy, which includes the direct delivery of a viral vector to a patient, have been explored. In vivo gene therapy is an attractive approach because it may not require any genotoxic conditioning (or could require less genotoxic conditioning) nor ex vivo cell processing and thus could be adopted at many institutions worldwide, including those in developing countries, as the therapy could be administered through an injection, similar to what is already done worldwide for the delivery of vaccines. In various embodiments methods of in vivo gene therapy with adenoviral vectors of the present disclosure can include one or more steps of (i) target cell mobilization, (ii) immunosuppression, (iii) administration of a vector, genome, system or formulation provided herein, and/or (iv) selection of transduced cells and/or cells that have integrated an integration element of a payload of an adenoviral vector or genome.

[0660] The adenoviral vector formulations disclosed herein can be used for treating subjects (humans, veterinary animals (dogs, cats, reptiles, birds, etc.), livestock (horses, cattle, goats, pigs, chickens, etc.), and research animals (monkeys, rats, mice, fish, etc.). Treating subjects includes delivering therapeutically effective amounts of one or more vectors, genomes, or systems of the present disclosure. Therapeutically effective amounts include those that provide effective amounts, prophylactic treatments, and/or therapeutic treatments.

IV(A)i. Mobilization of HSCs

[0661] Vectors described herein can be administered in coordination with mobilization factors. In certain embodiments, adenoviral vector formulations described herein can be administered in concert with HSPC mobilization. In particular embodiments, administration of adenoviral donor vector occurs concurrently with administration of one or more mobilization factors. In particular embodiments, administration of adenoviral donor vector follows administration of one or more mobilization factors. In particular embodiments, administration of adenoviral donor vector follows administration of a first one or more mobilization factors and occurs concurrently with administration of a second one or more mobilization factors. Agents for HSPC mobilization include, for example, granulocyte-colony stimulating factor (G-CSF), granulocyte macrophage colony stimulating factor (GM-CSF), AMD3100, SCF, S-CSF, a CXCR4 antagonist, a CXCR2 agonist, and Gro-Beta (GRO-β). In various embodiments, a CXCR4 antagonist is AMD3100 and/or a CXCR2 agonist is GRO-β.

[0662] G-CSF is a cytokine whose functions in HSPC mobilization can include the promotion of granulocyte expansion and both protease-dependent and independent attenuation of adhesion molecules and disruption of the SDF-1/CXCR4 axis. In particular embodiments, any commercially available form of G-CSF known to one of ordinary skill in the art can be used in the methods and formulations as disclosed herein, for example, Filgrastim (Neupogen®, Amgen Inc., Thousand Oaks, Calif.) and PEGylated Filgrastim (Pegfilgrastim, NEULASTA®, Amgen Inc., Thousand Oaks, Calif.).

[0663] GM-CSF is a monomeric glycoprotein also known as colony-stimulating factor 2 (CSF2) that functions as a cytokine and is naturally secreted by macrophages, T cells, mast cells, natural killer cells, endothelial cells, and fibroblasts. In particular embodiments, any commercially available form of GM-CSF known to one of ordinary skill in the art can be used in the methods and formulations as disclosed herein, for example, Sargramostim (Leukine, Bayer Healthcare Pharmaceuticals, Seattle, Wash.) and molgramostim (Schering-Plough, Kenilworth, N.J.).

[0664] AMD3100 (MOZOBIL™, PLERIXAFOR™; Sanofi-Aventis, Paris, France), a synthetic organic molecule of the bicyclam class, is a chemokine receptor antagonist and reversibly inhibits SDF-1 binding to CXCR4, promoting HSPC mobilization. AMD3100 is approved to be used in combination with G-CSF for HSPC mobilization in patients with myeloma and lymphoma. The structure of AMD3100 is:

[chemical structure]

[0665] SCF, also known as KIT ligand, KL, or steel factor, is a cytokine that binds to the c-kit receptor (CD117). SCF can exist both as a transmembrane protein and a soluble protein. This cytokine plays an important role in hematopoiesis, spermatogenesis, and melanogenesis. In particular embodiments, any commercially available form of SCF known to one of ordinary skill in the art can be used in the methods and formulations as disclosed herein, for example, recombinant human SCF (Ancestim, STEMGEN®, Amgen Inc., Thousand Oaks, Calif.).

[0666] Chemotherapy used in intensive myelosuppressive treatments also mobilizes HSPCs to the peripheral blood as a result of compensatory neutrophil production following chemotherapy-induced aplasia. In particular embodiments, chemotherapeutic agents that can be used for mobilization of HSPCs include cyclophosphamide, etoposide, ifosfamide, cisplatin, and cytarabine.

[0667] Additional agents that can be used for cell mobilization include: CXCL12/CXCR4 modulators (e.g., CXCR4 antagonists: POL6326 (Polyphor, Allschwil, Switzerland), a synthetic cyclic peptide which reversibly inhibits CXCR4; BKT-140 (4F-benzoyl-TN14003; Biokine Therapeutics, Rehovit, Israel); TG-0054 (Taigen Biotechnology, Taipei, Taiwan); CXCL12 neutralizer NOX-Al2 (NOXXON Pharma, Berlin, Germany) which binds to SDF-1, inhibiting its binding to CXCR4); Sphingosine-1-phosphate (SIP) agonists (e.g., SEW2871, Juarez et al. Blood 119: 707-716, 2012); vascular cell adhesion molecule-1 (VCAM) or very late antigen 4 (VLA-4) inhibitors (e.g., Natalizumab, a recombinant humanized monoclonal antibody against α4 subunit of VLA-4 (Zohren et al. Blood 111: 3893-3895, 2008); B105192, a small molecule inhibitor of VLA-4 (Ramirez et al. Blood 114: 1340-1343, 2009)); parathyroid hormone (Brunner et al. Exp Hematol. 36: 1157-1166, 2008); proteasome inhibitors (e.g., Bortezomib, Ghobadi et al. ASH Annual Meeting Abstracts. p. 583, 2012); Groβ, a member of CXC chemokine family which stimulates chemotaxis and activation of neutrophils by binding to the CXCR2 receptor (e.g., SB-251353, King et al. Blood 97: 1534-1542, 2001); stabilization of hypoxia inducible factor (HIF) (e.g., FG-4497, Forristal et al. ASH Annual Meeting Abstracts. p. 216, 2012); Firategrast, an α4β1 and α4β7 integrin inhibitor (α4β1/7) (Kim et al. Blood 128: 2457-2461, 2016); Vedolizumab, a humanized monoclonal antibody against the a4p7 integrin (Rosario et al. Clin Drug lnvestig 36: 913-923, 2016); and BOP (N-(benzenesulfonyl)-L-prolyl-L-O-(1-pyrrolidinylcarbonyl) tyrosine) which targets integrins α9β1/α4β1 (Cao et al. Nat Commun 7: 11007, 2016). Additional agents that can be used for HSPC mobilization are described in, for example, Richter R et al. Transfus Med Hemother 44:151-164, 2017, Bendall & Bradstock, Cytokine & Growth Factor Reviews 25: 355-367, 2014, WO 2003043651, WO 2005017160, WO 2011069336, U.S. Pat. Nos. 5,637,323, 7,288,521, 9,782,429, US 2002/0142462, and US 2010/02268.

[0668] In particular embodiments, a therapeutically effective amount of G-CSF includes 0.1 μg/kg to 100 μg/kg. In particular embodiments, a therapeutically effective amount of G-CSF includes 0.5 μg/kg to 50 μg/kg. In particular embodiments, a therapeutically effective amount of G-CSF includes 0.5 μg/kg, 1 μg/kg, 2 μg/kg, 3 μg/kg, 4 μg/kg, 5 μg/kg, 6 μg/kg, 7 μg/kg, 8 μg/kg, 9 μg/kg, 10 μg/kg, 11 μg/kg, 12 μg/kg, 13 μg/kg, 14 μg/kg, 15 μg/kg, 16 μg/kg, 17 μg/kg, 18 μg/kg, 19 μg/kg, 20 μg/kg, or more. In particular embodiments, a therapeutically effective amount of G-CSF includes 5 μg/kg. In particular embodiments, G-CSF can be administered subcutaneously or intravenously. In particular embodiments, G-CSF can be administered for 1 day, 2 consecutive days, 3 consecutive days, 4 consecutive days, 5 consecutive days, or more. In particular embodiments, G-CSF can be administered for 4 consecutive days. In particular embodiments, G-CSF can be administered for 5 consecutive days. In particular embodiments, as a single agent, G-CSF can be used at a dose of 10 μg/kg subcutaneously daily, initiated 3, 4, 5, 6, 7, or 8 days before Ad35 delivery. In particular embodiments, G-CSF can be administered as a single agent followed by concurrent administration with another mobilization factor. In particular embodiments, G-CSF can be administered as a single agent followed by concurrent administration with AMD3100. In particular embodiments, a treatment protocol includes a 5 day treatment where G-CSF can be administered on day 1, day 2, day 3, and day 4 and on day 5, G-CSF and AMD3100 are administered 6 to 8 hours prior to Ad35 administration.

[0669] Therapeutically effective amounts of GM-CSF to administer can include doses ranging from, for example, 0.1 to 50 μg/kg or from 0.5 to 30 μg/kg. In particular embodiments, a dose at which GM-CSF can be administered includes 0.5 μg/kg, 1 μg/kg, 2 μg/kg, 3 μg/kg, 4 μg/kg, 5 μg/kg, 6 μg/kg, 7 μg/kg, 8 μg/kg, 9 μg/kg, 10 μg/kg, 11 μg/kg, 12 μg/kg, 13 μg/kg, 14 μg/kg, 15 μg/kg, 16 μg/kg, 17 μg/kg, 18 μg/kg, 19 μg/kg, 20 μg/kg, or more. In particular embodiments, GM-CSF can be administered subcutaneously for 1 day, 2 consecutive days, 3 consecutive days, 4 consecutive days, 5 consecutive days, or more. In particular embodiments, GM-CSF can be administered subcutaneously or intravenously. In particular embodiments, GM-CSF can be administered at a dose of 10 μg/kg subcutaneously daily initiated 3, 4, 5, 6, 7, or 8 days before Ad35 delivery. In particular embodiments, GM-CSF can be administered as a single agent followed by concurrent administration with another mobilization factor. In particular embodiments, GM-CSF can be administered as a single agent followed by concurrent administration with AMD3100. In particular embodiments, a treatment protocol includes a 5 day treatment where GM-CSF can be administered on day 1, day 2, day 3, and day 4 and on day 5, GM-CSF and AMD3100 are administered 6 to 8 hours prior to Ad35 administration. A dosing regimen for Sargramostim can include 200 μg/m², 210 μg/m², 220 μg/m², 230 μg/m², 240 μg/m², 250 μg/m², 260 μg/m², 270 μg/m², 280 μg/m², 290 μg/m², 300 μg/m², or more. In particular embodiments, Sargramostim can be administered for 1 day, 2 consecutive days, 3 consecutive days, 4 consecutive days, 5 consecutive days, or more. In particular embodiments, Sargramostim can be administered subcutaneously or intravenously. In particular embodiments, a dosing regimen for Sargramostim can include 250 μg/m²/day intravenous or subcutaneous and can be continued until a targeted cell amount is reached in the peripheral blood or can be continued for 5 days. In particular embodiments, Sargramostim can be administered as a single agent followed by concurrent administration with another mobilization factor. In particular embodiments, Sargramostim can be administered as a single agent followed by concurrent administration with AMD3100. In particular embodiments, a treatment protocol includes a 5 day treatment where Sargramostim can be administered on day 1, day 2, day 3, and day 4 and on day 5, Sargramostim and AMD3100 are administered 6 to 8 hours prior to Ad35 administration.

[0670] In particular embodiments, a therapeutically effective amount of AMD3100 includes 0.1 mg/kg to 100 mg/kg. In particular embodiments, a therapeutically effective amount of AMD3100 includes 0.5 mg/kg to 50 mg/kg. In particular embodiments, a therapeutically effective amount of AMD3100 includes 0.5 mg/kg, 1 mg/kg, 2 mg/kg, 3 mg/kg, 4 mg/kg, 5 mg/kg, 6 mg/kg, 7 mg/kg, 8 mg/kg, 9 mg/kg, 10 mg/kg, 11 mg/kg, 12 mg/kg, 13 mg/kg, 14 mg/kg, 15 mg/kg, 16 mg/kg, 17 mg/kg, 18 mg/kg, 19 mg/kg, 20 mg/kg, or more. In particular embodiments, a therapeutically effective amount of AMD3100 includes 4 mg/kg. In particular embodiments, a therapeutically effective amount of AMD3100 includes 5 mg/kg. In particular embodiments, a therapeutically effective amount of AMD3100 includes 10 μg/kg to 500 μg/kg or from 50 μg/kg to 400 μg/kg. In particular embodiments, a therapeutically effective amount of AMD3100 includes 100 μg/kg, 150 μg/kg, 200 μg/kg, 250 μg/kg, 300 μg/kg, 350 μg/kg, or more. In particular embodiments, AMD3100 can be administered subcutaneously or intravenously. In particular embodiments, AMD3100 can be administered subcutaneously at 160-240 μg/kg 6 to 11 hours prior to Ad35 delivery. In particular embodiments, a therapeutically effective amount of AMD3100 can be administered concurrently with administration of another mobilization factor. In particular embodiments, a therapeutically effective amount of AMD3100 can be administered following administration of another mobilization factor. In particular embodiments, a therapeutically effective amount of AMD3100 can be administered following administration of G-CSF. In particular embodiments, a treatment protocol includes a 5-day treatment where G-CSF is administered on day 1, day 2, day 3, and day 4 and on day 5, G-CSF and AMD3100 are administered 6 to 8 hours prior to Ad35 injection.

[0671] Therapeutically effective amounts of SCF to administer can include doses ranging from, for example, 0.1 to 100 μg/kg/day or from 0.5 to 50 μg/kg/day. In particular embodiments, a dose at which SCF can be administered includes 0.5 μg/kg/day, 1 μg/kg/day, 2 μg/kg/day, 3 μg/kg/day, 4 μg/kg/day, 5 μg/kg/day, 6 μg/kg/day, 7 μg/kg/day, 8 μg/kg/day, 9 μg/kg/day, 10 μg/kg/day, 11 μg/kg/day, 12 μg/kg/day, 13 μg/kg/day, 14 μg/kg/day, 15 μg/kg/day, 16 μg/kg/day, 17 μg/kg/day, 18 μg/kg/day, 19 μg/kg/day, 20 μg/kg/day, 21 μg/kg/day, 22 μg/kg/day, 23 μg/kg/day, 24 μg/kg/day, 25 μg/kg/day, 26 μg/kg/day, 27 μg/kg/day, 28 μg/kg/day, 29 μg/kg/day, 30 μg/kg/day, or more. In particular embodiments, SCF can be administered for 1 day, 2 consecutive days, 3 consecutive days, 4 consecutive days, 5 consecutive days, or more. In particular embodiments, SCF can be administered subcutaneously or intravenously. In particular embodiments, SCF can be injected subcutaneously at 20 μg/kg/day. In particular embodiments, SCF can be administered as a single agent followed by concurrent administration with another mobilization factor. In particular embodiments, SCF can be administered as a single agent followed by concurrent administration with AMD3100. In particular embodiments, a treatment protocol includes a 5 day treatment where SCF can be administered on day 1, day 2, day 3, and day 4 and on day 5, SCF and AMD3100 are administered 6 to 8 hours prior to Ad35 administration.

[0672] In particular embodiments, growth factors GM-CSF and G-CSF can be administered to mobilize HSPC in the bone marrow niches to the peripheral circulating blood to increase the fraction of HSPCs circulating in the blood. In particular embodiments, mobilization can be achieved with administration of G-CSF/Filgrastim (Amgen) and/or AMD3100 (Sigma). In particular embodiments, mobilization can be achieved with administration of GM-CSF/Sargramostim (Amgen) and/or AMD3100 (Sigma). In particular embodiments, mobilization can be achieved with administration of SCF/Ancestim (Amgen) and/or AMD3100 (Sigma). In particular embodiments, administration of G-CSF/Filgrastim precedes administration of AMD3100. In particular embodiments, administration of G-CSF/Filgrastim occurs concurrently with administration of AMD3100. In particular embodiments, administration of G-CSF/Filgrastim precedes administration of AMD3100, followed by concurrent administration of G-CSF/Filgrastim and AMD3100. US 20140193376 describes mobilization protocols utilizing a CXCR4 antagonist with a S1P receptor 1 (S1PR1) modulator agent. US 20110044997 describes mobilization protocols utilizing a CXCR4 antagonist with a vascular endothelial growth factor receptor (VEGFR) agonist.

[0673] Ad35 viral vectors are an example of vectors that can be administered in concert with HSPC mobilization. In particular embodiments, administration of an Ad35 viral vector occurs concurrently with administration of one or more mobilization factors. In particular embodiments, administration of an Ad35 viral vector follows administration of one or more mobilization factors. In particular embodiments, administration of an Ad35 viral vector follows administration of a first one or more mobilization factors and occurs concurrently with administration of a second one or more mobilization factors.

[0674] In particular embodiments, an HSC enriching agent, such as a CD19 immunotoxin or 5-FU can be administered to enrich for HSPCs. CD19 immunotoxin can be used to deplete all CD19 lineage cells, which accounts for 30% of bone marrow cells. Depletion encourages exit from the bone marrow. By forcing HSPCs to proliferate (whether via CD19 immunotoxin of 5-FU, this stimulates their differentiation and exit from the bone marrow and increases transgene marking in peripheral blood cells.

[0675] Therapeutically effective amounts can be administered through any appropriate administration route such as by, injection, infusion, perfusion, and more particularly by administration by one or more of bone marrow, intravenous, intradermal, intraarterial, intranodal, intralymphatic, intraperitoneal injection, infusion, or perfusion).

IV(A)ii. Immunosuppression Regimens

[0676] Ad35 viral vectors can be administered concurrently with or following administration of one or more immunosuppression agents or immunosuppression regimens, which can include one or more steroids, IL-1 receptor antagonist, and/or an IL-6 receptor antagonist administration. These protocols can alleviate potential side effects of treatments.

[0677] IL-1 receptor antagonists are known and include ADC-1001 (Alligator Bioscience), FX-201 (Flexion Therapeutics), fusion proteins available from Bioasis Technologies, GQ-303 (Genequine Biotherapeutics GmbH), HL-2351 (Handok, Inc.), MBIL-1 RA (ProteoThera, Inc.), Anakinra (Pivor Pharmaceuticals), human immunoglobin G or Globulin S (GC Pharma). IL-6 receptor antagonists are also known in the art and include tocilizumab, BCD-089 (Biocad), HS-628 (Zhejiang Hisun Pharm), and APX-007 (Apexigen).

[0678] In various embodiments, an immune suppression regimen is administered to a subject that also receives at least one viral gene therapy vector, where the immune suppression regimen includes administration of at least one immune suppression agent to the subject on (i) one or more days prior to administration to the subject of a first dose of the viral gene therapy vector; (ii) on the same day as administration of a first dose of the viral gene therapy vector; (iii) on the same day as administration of one or more second or other subsequent doses of the viral gene therapy vector; and/or (iv) on any of one or more, or all, days intervening between administration to the subject of the first dose of the viral gene therapy vector and administration of any of one or more, or all, second or other subsequent doses of the viral gene therapy vector.

[0679] Immunosuppression regimens are further described, e.g., in U.S. Provisional Application No. 63/009,218, which is incorporated herein by reference in its entirety and in particular with respect to immunosuppression regimens.

IV(A)iii. Selection

[0680] In particular embodiments, methods of use include the treatment of conditions wherein corrected cells have a selective advantage over non-corrected cells. Ad35 viral vectors are an example of vectors that can be administered in concert with HSPC mobilization and prior to administration of selective agents that correspond with the in vivo selection cassette(s). Particular embodiments combine mobilization (e.g., a mobilization protocol described herein) with administration of an Ad35 vector described herein and BCNU or benzylguanine and temozolomide in the case of an Ad35 including a MGMT^{P140K} cassette and/or a CD33-targeting molecule in the case of the Ad35 vector including an anti-CD33 cassette.

[0681] In particular embodiments, in vivo Ad35-mediated gene delivery (with or without mobilization) can be combined with an in vivo selection marker. In particular embodiments, the in vivo selection marker can include MGMT^{P140K} as described in Olszko et al., Gene Therapy 22: 591-595, 2015.

[0682] The drug resistant gene MGMT encoding human alkyl guanine transferase (hAGT) is a DNA repair protein that confers resistance to the cytotoxic effects of alkylating agents, such as nitrosoureas and temozolomide (TMZ). 6-benzylguanine (6-BG) is an inhibitor of AGT that potentiates nitrosourea toxicity and is co-administered with TMZ to potentiate the cytotoxic effects of this agent. Several mutant forms of MGMT that encode variants of AGT are highly resistant to inactivation by 6-BG, but retain their ability to repair DNA damage (Maze et al. J. Pharmacol. Exp. Ther. 290: 1467-1474, 1999). MGMT^{P140K}-based drug resistant gene therapy has been shown to confer chemoprotection to mouse, canine, rhesus macaques, and human cells, specifically hematopoietic cells (Zielske et al. J. Clin. Invest. 112: 1561-1570, 2003; Pollok et al. Hum. Gene Ther. 14: 1703-1714, 2003; Gerull et al. Hum. Gene Ther. 18: 451-456, 2007; Neff et al. Blood 105: 997-1002, 2005; Larochelle et al. Clin. Invest. 119: 1952-1963, 2009; Sawai et al. Mol. Ther. 3: 78-87, 2001).

[0683] In particular embodiments, combination with an in vivo selection marker will be a critical component for diseases without a selective advantage of gene-corrected cells. For example, in SCID and some other immunodeficiencies and FA, corrected cells have an advantage and only transducing the therapeutic gene into a “few” HSPCs is sufficient for therapeutic efficacy. For other diseases like hemoglobinopathies (i.e., sickle cell disease and thalassemia) in which cells do not demonstrate a competitive advantage, in vivo selection of the gene corrected cells, such as in combination with an in vivo selection marker such as MGMT^{P140K}, will select for the few transduced HSPCs, allowing an increase in the gene corrected cells and in order to achieve therapeutic efficacy. This approach can also be applied to HIV by making HSPCs resistant to HIV in vivo rather than ex vivo genetic modification.

[0684] Additional approaches can also be used. For example, the current disclosure can utilize systems and methods to genetically modify cells to provide a therapeutic gene while at the same time reducing CD33 expression selectively in the genetically modified therapeutic cells. In this manner, genetically modified therapeutic cells will not be harmed by concurrent or subsequent anti-CD33 therapies a patient may receive. However, pre-existing CD33-expressing cells in the patient and/or administered cells that lack the genetic modification will not be protected, resulting in positive selection for the gene-corrected cells over uncorrected cells.

[0685] In particular embodiments, this approach is achieved by linking the therapeutic gene and a CD33 blocking molecule in a single intracellular delivery vehicle. In particular embodiments, the single intracellular delivery vehicle is an Ad35 viral vector.

[0686] In particular embodiments, the CD33 blocking molecule is an shRNA or siRNA CD33 blocking molecule combined with the therapeutic gene by inclusion within a common Ad35 viral vector. In particular embodiments, the CD33 blocking molecule is the shRNA sequence including SEQ ID NO: 187 or sequence including SEQ ID NO: 188.

[0687] CD33-targeting treatments include anti-CD33 antibodies, anti-CD33 immunotoxins, anti-CD33 antibody-drug conjugates, anti-CD33 antibody-radioisotope conjugates, anti-CD33 bi-specific antibodies, anti-CD33 BiTE® antibodies, anti-CD33 tri-specific antibodies, and/or anti-CD33 CAR.

### IV(B). In Vitro and Ex Vivo Gene Therapy

[0688] In vitro gene therapy includes use of a vector, genome, or system of the present disclosure in a method of introducing exogenous DNA into a host cell (such as a target cell) and/or a nucleic acid (such as a target nucleic acid, such as a target genome), where the host cell or nucleic acid is not present in a multicellular organism (e.g., in a laboratory). In some embodiments, a target cell or nucleic acid is derived from a multicellular organism, such as a mammal (e.g., a mouse, rat, human, or non-human primate). In vitro engineering of a cell derived from a multicellular organism can be referred to as ex vivo engineering, and can be used in ex vivo therapy. In various embodiments, methods and compositions of the present disclosure are utilized, e.g., as disclosed herein, to modify a target cell or nucleic acid derived from a first multicellular organism and the engineered target cell or nucleic acid is then administered to a second multicellular organism, such as a mammal (e.g., a mouse, rat, human, or non-human primate), e.g., in a method of adoptive cell therapy. In some instances, the first and second organisms are the same single subject organism. Return of in vitro engineered material to a subject from which the material was derived can be an autologous therapy. In some instances, the first and second organisms are different organisms (e.g., two organisms of the same species, e.g., two mice, two rats, two humans, or two non-human primates of the same species). Transfer of engineered material derived from a first subject to a second different subject can be an allogeneic therapy.

[0689] Ex vivo cell therapies can include isolation of stem, progenitor or differentiated cells from a patient or a normal donor, expansion of isolated cells ex vivo—with or without genetic engineering—and administration of the cells to a subject to establish a transient or stable graft of the infused cells and/or their progeny. Such ex vivo approaches can be used, for example, to treat an inherited, infectious or neoplastic disease, to regenerate a tissue or to deliver a therapeutic agent to a disease site. In various ex vivo therapies there is no direct exposure of the subject to the gene transfer vector, and the target cells of transduction can be selected, expanded and/or differentiated, before or after any genetic engineering, to improve efficacy and safety.

[0690] Ex vivo therapies include haematopoietic stem cell (HSC) transplantation (HCT). Autologous HSC gene therapy represents a therapeutic option for several monogenic diseases of the blood and the immune system as well as for storage disorders, and it may become a first-line treatment option for selected disease conditions. Another established cell and gene therapy application is adoptive immunotherapy, which exploits ex vivo expanded T cells, with or without genetic engineering to redirect their antigen specificity or to increase their safety profile, in order to harness the power of immune effector and regulatory cells for use against malignancies, infections and autoimmune diseases. A range of other types of somatic stem cells—in some cases involving genetic engineering—are showing promise for therapeutic applications, including epidermal and limbal stem cells, neural stem/progenitor cells (NSPCs), cardiac stem cells and multipotent stromal cells (MSCs).

[0691] Applications of ex-vivo therapy include reconstituting dysfunctional cell lineages. For inherited diseases characterized by a defective or absent cell lineage, the lineage can be regenerated by functional progenitor cells, derived either from normal donors or from autologous cells that have been subjected to ex vivo gene transfer to correct the deficiency. An example is provided by SCIDs, in which a deficiency in any one of several genes blocks the development of mature lymphoid cells. Transplantation of non-manipulated normal donor HSCs, which can allow generation of donor-derived functional haematopoietic cells of various lineages in the host, represents a therapeutic option for SCIDs, as well as many other diseases that affect the blood and immune system. Autologous HSC gene therapy, which can include replacing a functional copy of a defective gene in transplanted haematopoietic stem/progenitor cells (HSPCs) and, similarly to HCT, can provide a steady supply of functional progeny, may have several advantages, including reduced risk of graft versus host disease (GvHD), reduced risk of graft rejection, and reduced need for post-transplant immunosuppression.

[0692] Applications of ex-vivo therapy include augmenting therapeutic gene dosage. In some applications, HSC gene therapy may augment the therapeutic efficacy of allogenic HCT. Therapeutic gene dosage can be engineered to supra-normal levels in transplanted cells.

[0693] Applications of ex-vivo therapy include introducing novel function and targeting gene therapy. Ex vivo gene therapy can confer a novel function to HSCs or their progeny, such as establishing drug resistance to allow administration of a high-dose antitumor chemotherapy regime or establishing resistance to a pre-established infection with a virus, such as HIV, or other pathogen by expressing RNA-based agents (for example, ribozymes, RNA decoys, antisense RNA, RNA aptamers and small interfering RNA) and protein-based agents (for example, dominant-negative mutant viral proteins, fusion inhibitors and engineered nucleases that target the pathogen's genome).

[0694] Applications of ex-vivo therapy include enhancing immune responses. In neoplastic diseases, allogenic adaptive immune cell types, such as T cells, can recognize and kill cancer cells. Unfortunately, recognition of healthy tissues by alloreactive lymphocytes can also result in detrimental GvHD. Transfer of a suicide gene in donor lymphocytes allows their anti-tumor potential to be exploited, while taming their toxicity. In the autologous setting, lymphocytes with specificity directed against transformed or infected cells may be isolated from the patient's tissues and selectively expanded ex vivo Alternatively, they may be generated by transfer of a gene for a synthetic or chimeric antigen receptor that triggers the cell's response when it encounters transformed or infected cells. These approaches may potentiate an underlying host response to a tumor or infection, or induce it de novo.

### IV(C). Conditions Treatable by Gene Therapy

[0695] At least in part because adenoviral vectors of the present disclosure can be used in vivo, in vitro, or ex vivo for modification of host and/or target cells, and further because an adenoviral vector can include payloads encoding a wide variety of expression products, it will be clear from the present specification that various technologies provide herein have broad applicability and can be used to treat a wide variety of conditions. Examples of conditions treatable by administration of an adenoviral vector, genome, or system of the present disclosure include, without limitation, hemoglobinopathies, immunodeficiencies, point mutation conditions, cancers, protein deficiencies, infectious diseases, and inflammatory conditions.

[0696] In certain embodiments, vectors, genomes, systems and formulations disclosed herein can be used for treating subjects (humans, veterinary animals (dogs, cats, reptiles, birds, etc.), livestock (horses, cattle, goats, pigs, chickens, etc.), and research animals (monkeys, rats, mice, fish, etc.). Treating subjects includes delivering therapeutically effective amounts. Therapeutically effective amounts include those that provide effective amounts, prophylactic treatments, and/or therapeutic treatments.

[0697] In particular embodiments, methods and formulations disclosed herein can be used to treat blood disorders. In particular embodiments, formulations are administered to subjects to treat hemophilia, β-thalassemia major, Diamond Blackfan anemia (DBA), paroxysmal nocturnal hemoglobinuria (PNH), pure red cell aplasia (PRCA), refractory anemia, severe aplastic anemia, and/or blood cancers such as leukemia, lymphoma, and myeloma.

[0698] Hemoglobinopathies represent a global health burden with disproportionate outcomes. Defects in hemoglobin proteins or in the expression of globin genes can result in diseases termed hemoglobinopathies. Hemoglobinopathies are amongst the most common genetic disorders world-wide.

[0699] Every year, 1.1 million births worldwide are at risk for hemoglobinopathies, affecting as many as 25 in every 1,000 births in geographic regions where malaria falciparum is prevalent, owing to a natural resistance to malaria infection conferred by hemoglobin (Hb) genetic variance. In developed regions, patients are at risk of iron overload from chronic transfusions. In underdeveloped regions, survival is significantly lower. For example, in Africa, childhood mortality is 40% in patients with hemoglobinopathies, compared to 16% in all children.

[0700] Mutations in the globin genes may generate an abnormal form of hemoglobin, as in sickle cell disease (SCD) and hemoglobin C, D, and E disease, or result in reduced production of the α or β polypeptides and thus an imbalance of the globin chains in the cell. These latter conditions are termed α- or β-thalassemias, depending on which globin chain is impaired. 5% of the world population carry a significant hemoglobin variant with the sickle cell mutation in the b-globin (HBB) gene (a glutamate to valine conversion; historically E6V, contemporaneously E7V) being by far the most common (40% of carriers). The high prevalence and severity of hemoglobin disorders presents a substantial burden, impacting not only the lives of those affected but also health-care systems, since lifelong patient care is costly.

[0701] There are two forms of hemoglobin, fetal (HbF), which includes two alpha (α) and two gamma (γ) chains, and adult (HbA), which includes two α and two beta (β) chains. The natural switch from HbF to HbA occurs shortly after birth and is regulated by transcriptional repression of γ globin genes by factors including a master regulator, bcl11a. Critically, a variety of clinical observations demonstrate that the severity of β-hemoglobinopathies such as sickle cell disease and β-thalassemia are ameliorated by increased production of HbF.

[0702] In particular embodiments, a therapeutically effective treatment induces or increases expression of HbF, induces or increases production of hemoglobin and/or induces or increases production of β-globin. In particular embodiments, a therapeutically effective treatment improves blood cell function, and/or increases oxygenation of cells.

[0703] In various embodiments, the present disclosure includes treatment of a blood disorder using an adenoviral donor vector of the present disclosure that includes a β-globin long LCR, a β-globin promoter, and a coding nucleic acid sequence that encodes a protein or agent for treatment of the blood disorder. In various embodiments, the blood disorder is thalassemia and the protein is a β-globin or γ-globin protein, or a protein that otherwise partially or completely functionally replaces β-globin or γ-globin. In various embodiments, the blood disorder is hemophilia and the protein is ET3 or a protein that otherwise partially or completely functionally replaces Factor VIII. In various embodiments, the blood disorder is a point mutation disease such as sickle cell anemia, and the agent is a gene editing protein.

[0704] ET3 can have the following amino acid sequence: SEQ ID NO 301. In various embodiments, a Factor VIII replacement protein can have an amino acid sequence having at least 70%, 75%, 80%, 85%, 90%, 91%, 92%, 93%, 94%, 95%, 96%, 97%, 98%, 99%, or 100% identity to the SEQ ID NO: 301

[0705] β-globin can have the following amino acid sequence: SEQ ID NO 302. In various embodiments, a β-globin replacement protein can have an amino acid sequence having at least 70%, 75%, 80%, 85%, 90%, 91%, 92%, 93%, 94%, 95%, 96%, 97%, 98%, 99%, or 100% identity to SEQ ID NO: 302.

[0706] γ-globin can have the following amino acid sequence: SEQ ID NO 303. In various embodiments, a γ-globin replacement protein can have an amino acid sequence having at least 70%, 75%, 80%, 85%, 90%, 91%, 92%, 93%, 94%, 95%, 96%, 97%, 98%, 99%, or 100% identity to SEQ ID NO: 303.

[0707] More than 80 primary immune deficiency diseases are recognized by the World Health Organization. These diseases are characterized by an intrinsic defect in the immune system in which, in some cases, the body is unable to produce any or enough antibodies against infection. In other cases, cellular defenses to fight infection fail to work properly. Typically, primary immune deficiencies are inherited disorders.

[0708] Secondary, or acquired, immune deficiencies are not the result of inherited genetic abnormalities, but rather occur in individuals in which the immune system is compromised by factors outside the immune system. Examples include trauma, viruses, chemotherapy, toxins, and pollution. Acquired immunodeficiency syndrome (AIDS) is an example of a secondary immune deficiency disorder caused by a virus, the human immunodeficiency virus (HIV), in which a depletion of T lymphocytes renders the body unable to fight infection.

[0709] X-linked severe combined immunodeficiency (SCID-X1) is both a cellular and humoral immune depletion caused by mutations in the common gamma chain gene (γC), which result in the absence of T and natural killer (NK) lymphocytes and the presence of nonfunctional B lymphocytes. SCID-X1 is fatal in the first two years of life unless the immune system is reconstituted, for example, through bone marrow transplant (BMT) or gene therapy.

[0710] Because most individuals lack a matched donor for BMT or non-autologous gene therapy, haploidentical parental bone marrow depleted of mature T cells is often used; however, complications include graft versus host disease (GVHD), failure to make adequate antibodies hence requiring long-term immunoglobulin replacement, late loss of T cells due to failure to engraft hematopoietic stem and progenitor cells (HSPCs), chronic warts, and lymphocyte dysregulation.

[0711] Fanconi anemia (FA) is an inherited blood disorder that leads to bone marrow failure. It is characterized, in part, by a deficient DNA-repair mechanism. At least 20% of patients with FA develop cancers such as acute myeloid leukemias, and cancers of the skin, liver, gastrointestinal tract, and gynecological systems. The skin and gastrointestinal tumors are usually squamous cell carcinomas. The average age of patients who develop cancer is 15 years for leukemia, 16 years for liver tumors, and 23 years for other tumors.

[0712] A therapeutic gene can be selected to provide a therapeutically effective response against a condition that, in particular embodiments, is inherited. In particular embodiments, the condition can be Grave's Disease, rheumatoid arthritis, pernicious anemia, Multiple Sclerosis (MS), inflammatory bowel disease, systemic lupus erythematosus (SLE), adenosine deaminase deficiency (ADA-SCID) or severe combined immunodeficiency disease (SCID), Wiskott-Aldrich syndrome (WAS), chronic granulomatous disease (CGD), Fanconi anemia (FA), Battens disease, adrenoleukodystrophy (ALD) or metachromatic leukodystrophy (MLD), muscular dystrophy, pulmonary alveolar proteinosis (PAP), pyruvate kinase deficiency, Schwachman-Diamond-Blackfan anemia, dyskeratosis congenita, cystic fibrosis, Parkinson's disease, Alzheimer's disease, or amyotrophic lateral sclerosis (Lou Gehrig's disease). In particular embodiments, depending on the condition, the therapeutic gene may be a gene that encodes a protein and/or a gene whose function has been interrupted.

[0713] In particular embodiments, methods and formulations disclosed herein can be used to treat cancer. In particular embodiments, formulations are administered to subjects to treat acute lymphoblastic leukemia (ALL), acute myelogenous leukemia (AML), chronic lymphocytic leukemia (CLL), chronic myelogenous leukemia (CML), chronic myelomonocytic leukemia, diffuse large B-cell lymphoma, follicular lymphoma, Hodgkin's lymphoma, juvenile myelomonocytic leukemia, multiple myeloma, myelodysplasia, and/or non-Hodgkin's lymphoma.

[0714] Additional exemplary cancers that may be treated include astrocytoma, atypical teratoid rhabdoid tumor, brain and central nervous system (CNS) cancer, breast cancer, carcinosarcoma, chondrosarcoma, chordoma, choroid plexus carcinoma, choroid plexus papilloma, clear cell sarcoma of soft tissue, diffuse large B-cell lymphoma, ependymoma, epithelioid sarcoma, extragonadal germ cell tumor, extrarenal rhabdoid tumor, Ewing sarcoma, gastrointestinal stromal tumor, glioblastoma, HBV-induced hepatocellular carcinoma, head and neck cancer, kidney cancer, lung cancer, malignant rhabdoid tumor, medulloblastoma, melanoma, meningioma, mesothelioma, multiple myeloma, neuroglial tumor, not otherwise specified (NOS) sarcoma, oligoastrocytoma, oligodendroglioma, osteosarcoma, ovarian cancer, ovarian clear cell adenocarcinoma, ovarian endometrioid adenocarcinoma, ovarian serous adenocarcinoma, pancreatic cancer, pancreatic ductal adenocarcinoma, pancreatic endocrine tumor, pineoblastoma, prostate cancer, renal cell carcinoma, renal medullo carcinoma, rhabdomyosarcoma, sarcoma, schwannoma, skin squamous cell carcinoma, and stem cell cancer. In various particular embodiments, the cancer is ovarian cancer. In various particular embodiments the cancer is breast cancer.

[0715] In particular embodiments, methods and formulations disclosed herein can be used to treat point mutation conditions. In particular embodiments, formulations are administered to subjects to treat sickle cell disease, cystic fibrosis, Tay-Sachs disease, and/or phenylketonuria. In various embodiments, a transposon payload of the present disclosure encodes a CRISPR-Cas for corrective editing of a nucleic acid lesion. In various embodiments, a transposon payload of the present disclosure encodes a base editor for corrective editing of a nucleic acid lesion.

[0716] In particular embodiments, methods and formulations disclosed herein can be used to treat particular enzyme deficiency. In particular embodiments, formulations are administered to subjects to treat Hurler's syndrome, selective IgA deficiency, hyper IgM, IgG subclass deficiency, Niemann-Pick disease, Tay-Sachs disease, Gaucher disease, Fabry disease, Krabbe disease, glucosemia, maple syrup urine disease, phenylketonuria, glycogen storage disease, Friedreich ataxia, Zellweger syndrome, adrenoleukodystrophy, complement disorders, and/or mucopolysaccharidoses.

[0717] Therapeutically effective amounts may provide function to immune and other blood cells and/or microglial cells or may alternatively—depending on the treated condition—inhibit lymphocyte activation, induce apoptosis in lymphocytes, eliminate various subsets of lymphocytes, inhibit T cell activation, eliminate or inhibit autoreactive T cells, inhibit Th-2 or Th-1 lymphocyte activity, antagonize IL-1 or TNF, reduce inflammation, induce selective tolerance to an inciting agent, reduce or eliminate an immune-mediated condition; and/or reduce or eliminate a symptom of the immune-mediated condition. Therapeutically effective amounts may also provide functional DNA repair mechanisms; surfactant protein expression; telomere maintenance; lysosomal function; breakdown of lipids or other proteins such as amyloids; permit ribosomal function; and/or permit development of mature blood cell lineages which would otherwise not develop such as macrophages other white blood cell types.

[0718] In particular embodiments, methods of the present disclosure can restore T-cell mediated immune responses in a subject in need thereof. Restoration of T-cell mediated immune responses can include restoring thymic output and/or restoring normal T lymphocyte development.

[0719] In particular embodiments, restoring thymic output can include restoring the frequency of CD3+ T cells expressing CD45RA in peripheral blood to a level comparable to that of a reference level derived from a control population. In particular embodiments, restoring thymic output can include restoring the number of T cell receptor excision circles (TRECs) per 106 maturing T cells to a level comparable to that of a reference level derived from a control population. The number of TRECs per 106 maturing T cells can be determined as described in Kennedy et al., Vet Immunol Immunopathol 142: 36-48, 2011.

[0720] In particular embodiments, restoring normal T lymphocyte development includes restoring the ratio of CD4+ cells: CD8+ cells to 2. In particular embodiments, restoring normal T lymphocyte development includes detecting the presence of αβ TCR in circulating T-lymphocytes. The presence of αβ TCR in circulating T-lymphocytes can be detected, for example, by flow cytometry using antibodies that bind an α and/or β chain of a TCR. In particular embodiments, restoring normal T lymphocyte development includes detecting the presence of a diverse TCR repertoire comparable to that of a reference level derived from a control population. TCR diversity can be assessed by TCRVβ spectratyping, which analyzes genetic rearrangement of the variable region of the TCR gene. Robust, normal spectratype profiles can be characterized by a Gaussian distribution of fragments sized across 17 families of TCRVβ segments. In particular embodiments, restoring normal T lymphocyte development includes restoring T-cell specific signaling pathways. Restoration of T-cell specific signaling pathways can be assessed by lymphocyte proliferation following exposure to the T cell mitogen phytohemagglutinin (PHA). In particular embodiments, restoring normal T lymphocyte development includes restoring white blood cell count, neutrophil cell count, monocyte cell count, lymphocyte cell count, and/or platelet cell count to a level comparable to a reference level derived from a control population.

[0721] In particular embodiments, methods of the present disclosure can improve the kinetics and/or clonal diversity of lymphocyte reconstitution in a subject in need thereof. In particular embodiments, improving the kinetics of lymphocyte reconstitution can include increasing the number of circulating T lymphocytes to within a range of a reference level derived from a control population. In particular embodiments, improving the kinetics of lymphocyte reconstitution can include increasing the absolute CD3+ lymphocyte count to within a range of a reference level derived from a control population. A range of can be a range of values observed in or exhibited by normal (i.e., non-immuno-compromised) subjects for a given parameter. In particular embodiments, improving the kinetics of lymphocyte reconstitution can include reducing the time required to reach normal lymphocyte counts as compared to a subject in need thereof not administered a therapy described herein. In particular embodiments, improving the kinetics of lymphocyte reconstitution can include increasing the frequency of gene corrected lymphocytes as compared to a subject in need thereof not administered a therapy described herein. In particular embodiments, improving the kinetics of lymphocyte reconstitution can include increasing diversity of clonal repertoire of gene corrected lymphocytes in the subject as compared to a subject in need thereof not administered a gene therapy described herein. Increasing diversity of clonal repertoire of gene corrected lymphocytes can include increasing the number of unique retroviral integration site (RIS) clones as measured by a RIS analysis.

[0722] In particular embodiments, methods of the present disclosure can restore bone marrow function in a subject in need thereof. In particular embodiments, restoring bone marrow function can include improving bone marrow repopulation with gene corrected cells as compared to a subject in need thereof not administered a therapy described herein. Improving bone marrow repopulation with gene corrected cells can include increasing the percentage of cells that are gene corrected. In particular embodiments, the cells are selected from white blood cells and bone marrow derived cells. In particular embodiments, the percentage of cells that are gene corrected can be measured using an assay selected from quantitative real time PCR and flow cytometry.

[0723] In particular embodiments, methods of the present disclosure can normalize primary and secondary antibody responses to immunization in a subject in need thereof. Normalizing primary and secondary antibody responses to immunization can include restoring B-cell and/or T-cell cytokine signaling programs functioning in class switching and memory response to an antigen. Normalizing primary and secondary antibody responses to immunization can be measured by a bacteriophage immunization assay. In particular embodiments, restoration of B-cell and/or T-cell cytokine signaling programs can be assayed after immunization with the T-cell dependent neoantigen bacteriophage ψX174. In particular embodiments, normalizing primary and secondary antibody responses to immunization can include increasing the level of IgA, IgM, and/or IgG in a subject in need thereof to a level comparable to a reference level derived from a control population. In particular embodiments, normalizing primary and secondary antibody responses to immunization can include increasing the level of IgA, IgM, and/or IgG in a subject in need thereof to a level greater than that of a subject in need thereof not administered a gene therapy described herein. The level of IgA, IgM, and/or IgG can be measured by, for example, an immunoglobulin test. In particular embodiments, the immunoglobulin test includes antibodies binding IgG, IgA, IgM, kappa light chain, lambda light chain, and/or heavy chain. In particular embodiments, the immunoglobulin test includes serum protein electrophoresis, immunoelectrophoresis, radial immunodiffusion, nephelometry and turbidimetry. Commercially available immunoglobulin test kits include MININEPH™ (Binding site, Birmingham, UK), and immunoglobulin test systems from Dako (Denmark) and Dade Behring (Marburg, Germany). In particular embodiments, a sample that can be used to measure immunoglobulin levels includes a blood sample, a plasma sample, a cerebrospinal fluid sample, and a urine sample.

[0724] In particular embodiments, methods of the present disclosure can be used to treat SCID-X1. In particular embodiments, methods of the present disclosure can be used to treat SCID (e.g., JAK 3 kinase deficiency SCID, purine nucleoside phosphorylase (PNP) deficiency SCID, adenosine deaminase (ADA) deficiency SCID, MHC class II deficiency or recombinase activating gene (RAG) deficiency SCID). In particular embodiments, therapeutic efficacy can be observed through lymphocyte reconstitution, improved clonal diversity and thymopoiesis, reduced infections, and/or improved patient outcome. Therapeutic efficacy can also be observed through one or more of weight gain and growth, improved gastrointestinal function (e.g., reduced diarrhea), reduced upper respiratory symptoms, reduced fungal infections of the mouth (thrush), reduced incidences and severity of pneumonia, reduced meningitis and blood stream infections, and reduced ear infections. In particular embodiments, treating SCIDX-1 with methods of the present disclosure include restoring functionality to the γC-dependent signaling pathway. The functionality of the γC-dependent signaling pathway can be assayed by measuring tyrosine phosphorylation of effector molecules STAT3 and/or STAT5 following in vitro stimulation with IL-21 and/or IL-2, respectively. Tyrosine phosphorylation of STAT3 and/or STAT5 can be measured by intracellular antibody staining.

[0725] In particular embodiments, methods of the present disclosure can be used to treat FA. In particular embodiments, therapeutic efficacy can be observed through lymphocyte reconstitution, improved clonal diversity and thymopoiesis, reduced infections, and/or improved patient outcome. Therapeutic efficacy can also be observed through one or more of weight gain and growth, improved gastrointestinal function (e.g., reduced diarrhea), reduced upper respiratory symptoms, reduced fungal infections of the mouth (thrush), reduced incidences and severity of pneumonia, reduced meningitis and blood stream infections, and reduced ear infections. In particular embodiments, treating FA with methods of the present disclosure include increasing resistance of bone marrow derived cells to mitomycin C (MMC). In particular embodiments, the resistance of bone marrow derived cells to MMC can be measured by a cell survival assay in methylcellulose and MMC.

[0726] In particular embodiments, methods of the present disclosure can be used to treat hypogammaglobulinemia. Hypogammaglobulinemia is caused by a lack of B-lymphocytes and is characterized by low levels of antibodies in the blood. Hypogammaglobulinemia can occur in patients with chronic lymphocytic leukemia (CLL), multiple myeloma (MM), non-Hodgkin's lymphoma (NHL) and other relevant malignancies as a result of both leukemia-related immune dysfunction and therapy-related immunosuppression. Patients with acquired hypogammaglobulinemia secondary to such hematological malignancies, and those patients receiving post-HSPC transplantation are susceptible to bacterial infections. The deficiency in humoral immunity is largely responsible for the increased risk of infection-related morbidity and mortality in these patients, especially by encapsulated microorganisms. For example, Streptococcus pneumoniae, Haemophilus influenzae, and Staphylococcus aureus, as well as Legionella and Nocardia spp. are frequent bacterial pathogens that cause pneumonia in patients with CLL. Opportunistic infections such as Pneumocystis carinii, fungi, viruses, and mycobacteria also have been observed. The number and severity of infections in these patients can be significantly reduced by administration of immune globulin (Griffiths et al. Blood 73: 366-368, 1989; Chapel et al. Lancet 343: 1059-1063, 1994).

[0727] In particular embodiments, formulations are administered to subjects to treat acute lymphoblastic leukemia (ALL), acute myelogenous leukemia (AML), adrenoleukodystrophy, agnogenic myeloid metaplasia, amegakaryocytosic/congenital thrombocytopenia, ataxia telangiectasia, β-thalassemia major, chronic granulomatous disease, chronic lymphocytic leukemia (CLL), chronic myelogenous leukemia (CML), chronic myelomonocytic leukemia, common variable immune deficiency (CVID), complement disorders, congenital agammaglobulinemia, Diamond Blackfan syndrome, diffuse large B-cell lymphoma, familial erythrophagocytic lymphohistiocytosis, follicular lymphoma, Hodgkin's lymphoma, Hurler's syndrome, hyper IgM, IgG subclass deficiency, juvenile myelomonocytic leukemia, metachromatic leukodystrophy, mucopolysaccharidoses, multiple myeloma, myelodysplasia, non-Hodgkin's lymphoma, paroxysmal nocturnal hemoglobinuria (PNH), primary immunodeficiency diseases with antibody deficiency, pure red cell aplasia, refractory anemia, Shwachman-Diamond-Blackfan anemia (DBA), selective IgA deficiency, severe aplastic anemia, sickle cell disease, specific antibody deficiency, Wiskott-Aldridge syndrome, and/or X-linked agammaglobulinemia (XLA).

[0728] Additional exemplary cancers that may be treated include astrocytoma, atypical teratoid rhabdoid tumor, brain and central nervous system (CNS) cancer, breast cancer, carcinosarcoma, chondrosarcoma, chordoma, choroid plexus carcinoma, choroid plexus papilloma, clear cell sarcoma of soft tissue, diffuse large B-cell lymphoma, ependymoma, epithelioid sarcoma, extragonadal germ cell tumor, extrarenal rhabdoid tumor, Ewing sarcoma, gastrointestinal stromal tumor, glioblastoma, HBV-induced hepatocellular carcinoma, head and neck cancer, kidney cancer, lung cancer, malignant rhabdoid tumor, medulloblastoma, melanoma, meningioma, mesothelioma, multiple myeloma, neuroglial tumor, not otherwise specified (NOS) sarcoma, oligoastrocytoma, oligodendroglioma, osteosarcoma, ovarian cancer, ovarian clear cell adenocarcinoma, ovarian endometrioid adenocarcinoma, ovarian serous adenocarcinoma, pancreatic cancer, pancreatic ductal adenocarcinoma, pancreatic endocrine tumor, pineoblastoma, prostate cancer, renal cell carcinoma, renal medullary carcinoma, rhabdomyosarcoma, sarcoma, schwannoma, skin squamous cell carcinoma, and stem cell cancer. In various particular embodiments, the cancer is ovarian cancer. In various particular embodiments the cancer is breast cancer.

[0729] In the context of cancers, therapeutically effective amounts can decrease the number of tumor cells, decrease the number of metastases, decrease tumor volume, increase life expectancy, induce apoptosis of cancer cells, induce cancer cell death, induce chemo- or radiosensitivity in cancer cells, inhibit angiogenesis near cancer cells, inhibit cancer cell proliferation, inhibit tumor growth, prevent metastasis, prolong a subject's life, reduce cancer-associated pain, reduce the number of metastases, and/or reduce relapse or re-occurrence of the cancer following treatment.

[0730] Particular embodiments include treatment of secondary, or acquired, immune deficiencies such as immune deficiencies caused by trauma, viruses, chemotherapy, toxins, and pollution. As previously indicated, acquired immunodeficiency syndrome (AIDS) is an example of a secondary immune deficiency disorder caused by a virus, the human immunodeficiency virus (HIV), in which a depletion of T lymphocytes renders the body unable to fight infection. Thus, as another example, a gene can be selected to provide a therapeutically effective response against an infectious disease. In particular embodiments, the infectious disease is human immunodeficiency virus (HIV). The therapeutic gene may be, for example, a gene rendering immune cells resistant to HIV infection, or which enables immune cells to effectively neutralize the virus via immune reconstruction, polymorphisms of genes encoding proteins expressed by immune cells, genes advantageous for fighting infection that are not expressed in the patient, genes encoding an infectious agent, receptor or coreceptor; a gene encoding ligands for receptors or coreceptors; viral and cellular genes essential for viral replication including; a gene encoding ribozymes, antisense RNA, small interfering RNA (siRNA) or decoy RNA to block the actions of certain transcription factors; a gene encoding dominant negative viral proteins, intracellular antibodies, intrakines and suicide genes. Exemplary therapeutic genes and gene products include α2β1; αvβ3; αvβ5; αvβ63; BOB/GPR15; Bonzo/STRL-33/TYMSTR; CCR2; CCR3; CCR5; CCR8; CD4; CD46; CD55; CXCR4; aminopeptidase-N; HHV-7; ICAM; ICAM-1; PRR2/HveB; HveA; α-dystroglycan; LDLR/a2MR/LRP; PVR; PRR1/HveC; and laminin receptor. A therapeutically effective amount for the treatment of HIV, for example, may increase the immunity of a subject against HIV, ameliorate a symptom associated with AIDS or HIV, or induce an innate or adaptive immune response in a subject against HIV. An immune response against HIV may include antibody production and result in the prevention of AIDS and/or ameliorate a symptom of AIDS or HIV infection of the subject, or decrease or eliminate HIV infectivity and/or virulence.

[0731] Particular embodiments, formulations are administered to subjects to prevent or delay cancer reoccurrence or prevent or delay cancer onset in carriers of high-risk germ line mutations. In particular embodiments, formulations are administered to subjects to receive higher therapeutic doses of temozolomide (TMZ) and benzylguanine or BCNU. Due to strong myelosupressvive off-target effects, it remains a challenge to deliver an effective dose of TMZ and benzylguanine to tumors. Patients may currently receive TMZ and benzylguanine for treatments associated with acute myeloid leukemia (AML), esophageal Cancer, Head & Neck Cancer, High-Grade Glioma, myelodysplastic syndrome, non-small cell lung cancer, NSCLC; Refractory AML, small cell lung cancer, anaplastic astrocytoma, brain tumors, breast cancer (e.g., metastatic), colorectal cancer (e.g., metastatic), diffuse intrinsic brainstem glioma, Ewing sarcoma, glioblastoma multiforme (GBM), malignant glioma, melanoma, metastatic malignant melanoma, recurrent malignant melanoma, nasopharyngeal cancer, metastatic breast cancer, and pediatric cancers.

[0732] Patients with MGMT expressing tumors would benefit from administration of Ad35 viral vector with an active ingredient (such as a CAR, TCR, or checkpoint inhibitor) combined with the MGMT^{P140K} in vivo selection cassette. Ex vivo approaches have shown the applicability of this approach. In particular embodiments, therapeutic amounts of TMZ and benzylguanine or BCNU are administered to reduce the tumor burden or volume.

[0733] In particular embodiments, therapeutically effective amounts may provide function to immune and other blood cells, reduce or eliminate an immune-mediated condition; and/or reduce or eliminate a symptom of the immune-mediated condition.

[0734] In the vectors, mobilization factors, formulations, and methods of use described herein, variants of protein and/or nucleic acid sequences can also be used. Variants include sequences with at least 70% sequence identity, 80% sequence identity, 85% sequence, 90% sequence identity, 95% sequence identity, 96% sequence identity, 97% sequence identity, 98% sequence identity, or 99% sequence identity to the protein and nucleic acid sequences described or disclosed herein wherein the variant exhibits substantially similar or improved biological function.

[0735] Obtained values for parameters associated with in vivo gene therapy and/or HSPC mobilization described herein can be compared to a reference level derived from a control population, and this comparison can indicate whether an in vivo gene therapy described herein is effective for a subject in need thereof administered the gene therapy. Parameters associated with in vivo gene therapy and/or HSPC mobilization can include, for example: number of total white blood cells, neutrophils, monocytes, lymphocytes, and/or platelets; time required to reach normal lymphocyte counts; percent CD3+CD45RA+ T cells; number of TRECs per 10⁶ cells; percent of cells that are CD4+; percent of cells that are CD8+; the ratio of CD4/CD8; percent of TCRαβ+ cells in CD3+ T cells; diversity of TCR; frequency of gene corrected lymphocytes; diversity of clonal repertoire of gene corrected lymphocytes; number of unique RIS clones; primary and secondary antibody responses to bacteriophage injection; rate of bacteriophage inactivation; percentage of cells that are gene corrected; level of immunoglobulins IgA, IgM, and/or IgG; resistance of bone marrow derived cells to mitomycin C; percent of living cells in methylcellulose and mitomycin C; functionality of γC-dependent signaling pathway; and percent phosphorylation of STAT3 with IL-21/mitogen stimulation of cells. Reference levels can be obtained from one or more relevant datasets from a control population. A “dataset” as used herein is a set of numerical values resulting from evaluation of a sample (or population of samples) under a desired condition. The values of the dataset can be obtained, for example, by experimentally obtaining measures from a sample and constructing a dataset from these measurements. As is understood by one of ordinary skill in the art, the reference level can be based on e.g., any mathematical or statistical formula useful and known in the art for arriving at a meaningful aggregate reference level from a collection of individual datapoints; e.g., mean, median, median of the mean, etc. Alternatively, a reference level or dataset to create a reference level can be obtained from a service provider such as a laboratory, or from a database or a server on which the dataset has been stored.

[0736] A reference level from a dataset can be derived from previous measures derived from a control population. A “control population” is any grouping of subjects or samples of like specified characteristics. The grouping could be according to, for example, clinical parameters, clinical assessments, therapeutic regimens, disease status, severity of condition, etc. In particular embodiments, the grouping is based on age range (e.g., 0-2 years) and non-immunocompromised status. In particular embodiments, a normal control population includes individuals that are age-matched to a test subject and non-immune compromised. In particular embodiments, age-matched includes, e.g., 0-6 months old; 0-1 year old; 0-2 years old; 0-3 years old; 10-15 years old, as is clinically relevant under the circumstances).

[0737] In particular embodiments, the relevant reference level for values of a particular parameter associated with in vivo gene therapy and/or HSPC mobilization described herein is obtained based on the value of a particular corresponding parameter associated with in vivo gene therapy and/or HSPC mobilization in a control population to determine whether an in vivo gene therapy disclosed herein has been therapeutically effective for a subject in need thereof administered the gene therapy.

[0738] In particular embodiments, a control population can include those that are healthy and do not have immune deficiencies. In particular embodiments, a control population can include those that have an immune deficiency and have not been administered a therapeutically effective amount of (i) a formulation including an Ad35 viral vector associated with a therapeutic gene; and (ii) mobilization factors. In particular embodiments, a control population can include those that have an immune deficiency and have been administered a therapeutically effective amount of a formulation including an Ad35 viral vector associated with a therapeutic gene and not including mobilization factors. As an example, the relevant reference level can be the value of the particular parameter associated with in vivo gene therapy and/or HSPC mobilization in the control subjects.

[0739] In particular embodiments, conclusions are drawn based on whether a sample value is statistically significantly different or not statistically significantly different from a reference level. A measure is not statistically significantly different if the difference is within a level that would be expected to occur based on chance alone. In contrast, a statistically significant difference or increase is one that is greater than what would be expected to occur by chance alone. Statistical significance or lack thereof can be determined by any of various methods well-known in the art. An example of a commonly used measure of statistical significance is the p-value. The p-value represents the probability of obtaining a given result equivalent to a particular datapoint, where the datapoint is the result of random chance alone. A result is often considered significant (not random chance) at a p-value less than or equal to 0.05. In particular embodiments, a sample value is “comparable to” a reference level derived from a normal control population if the sample value and the reference level are not statistically significantly different.

[0740] In particular embodiments, values obtained for parameters associated with in vivo gene therapy and/or HSPC mobilization described herein and/or other dataset components can be subjected to an analytic process with chosen parameters. The parameters of the analytic process may be those disclosed herein or those derived using the guidelines described herein. The analytic process used to generate a result may be any type of process capable of providing a result useful for classifying a sample, for example, comparison of the obtained value with a reference level, a linear algorithm, a quadratic algorithm, a decision tree algorithm, or a voting algorithm. The analytic process may set a threshold for determining the probability that a sample belongs to a given class. The probability preferably is at least 60%, at least 70%, at least 80%, at least 90%, at least 95% or higher.

[0741] Ad35 vectors described herein can be utilized in place of Ad5/Ad35++ vectors described in the following Exemplary Embodiments and Examples.

[0742] The Exemplary Embodiments and Example(s) below are included to demonstrate particular embodiments of the disclosure. Those of ordinary skill in the art should recognize in light of the present disclosure that many changes can be made to the specific embodiments disclosed herein and still obtain a like or similar result without departing from the spirit and scope of the disclosure.

### V. EXEMPLARY EMBODIMENTS

[0743] A first set of exemplary embodiments can include the following:

1. A recombinant adenoviral serotype 35 (Ad35) vector production system including: a recombinant Ad35 helper genome including: a nucleic acid sequence encoding an Ad35 fiber shaft; a nucleic acid sequence encoding an Ad35 fiber knob; and recombinase direct repeats (DRs) flanking at least a portion of an Ad35 packaging sequence, and a recombinant helper dependent Ad35 donor genome including: a 5′ Ad35 inverted terminal repeat (ITR); a 3′ Ad35 ITR; an Ad35 packaging sequence; and a nucleic acid sequence encoding at least one heterologous expression product.
2. A recombinant adenoviral serotype 35 (Ad35) helper vector including: an Ad35 fiber shaft; an Ad35 fiber knob; and an Ad35 genome including recombinase direct repeats (DRs) flanking at least a portion of an Ad35 packaging sequence.
3. A recombinant adenoviral serotype 35 (Ad35) helper genome including: a nucleic acid sequence encoding an Ad35 fiber shaft; a nucleic acid sequence encoding an Ad35 fiber knob; and recombinase direct repeats (DRs) flanking at least a portion of an Ad35 packaging sequence.
4. A recombinant helper dependent adenoviral serotype 35 (Ad35) donor vector including: a nucleic acid sequence including: a 5′ Ad35 inverted terminal repeat (ITR); a 3′ Ad35 ITR; an Ad35 packaging sequence; and a nucleic acid sequence encoding at least one heterologous expression product, wherein the genome does not include a nucleic acid sequence encoding an Ad35 viral structural protein; and an Ad35 fiber shaft and/or an Ad35 fiber knob.
5. A recombinant helper dependent adenoviral serotype 35 (Ad35) donor genome including: a 5′ Ad35 inverted terminal repeat (ITR); a 3′ Ad35 ITR; an Ad35 packaging sequence; and a nucleic acid sequence encoding at least one heterologous expression product, wherein the Ad35 donor genome does not include a nucleic acid sequence encoding an expression product encoded by the wild-type Ad35 genome.
6. A method of producing a recombinant helper dependent adenoviral serotype 35 (Ad35) donor vector, the method including isolating the recombinant helper dependent Ad35 donor vector from a culture of cells, wherein the cells include: a recombinant Ad35 helper genome including: a nucleic acid sequence encoding an Ad35 fiber shaft; a nucleic acid sequence encoding an Ad35 fiber knob; and recombinase direct repeats (DRs) flanking at least a portion of an Ad35 packaging sequence, and a recombinant helper dependent Ad35 donor genome including: a 5′ Ad35 inverted terminal repeat (ITR); a 3′ Ad35 ITR; an Ad35 packaging sequence; and a nucleic acid sequence encoding at least one heterologous expression product.
7. A recombinant adenoviral serotype 35 (Ad35) production system including: a recombinant Ad35 helper genome including: a nucleic acid sequence encoding an Ad35 fiber shaft; a nucleic acid sequence encoding an Ad35 fiber knob; and recombinase direct repeats (DRs) within 550 nucleotides of the 5′ end of the Ad35 genome that functionally disrupt the Ad35 packaging signal but not the 5′ Ad35 inverted terminal repeat (ITR), and a recombinant Ad35 donor genome including: a 5′ Ad35 ITR; a 3′ Ad35 ITR; an Ad35 packaging sequence; and a nucleic acid sequence encoding at least one heterologous expression product.
8. A recombinant adenoviral serotype 35 (Ad35) helper vector including: an Ad35 fiber shaft; an Ad35 fiber knob; and an Ad35 genome including recombinase direct repeats (DRs) within 550 nucleotides of the 5′ end of the Ad35 genome that functionally disrupt the Ad35 packaging signal but not the 5′ Ad35 inverted terminal repeat (ITR).
9. A recombinant adenoviral serotype 35 (Ad35) helper genome including: a nucleic acid sequence encoding an Ad35 fiber shaft; a nucleic acid sequence encoding an Ad35 fiber knob; and recombinase direct repeats (DRs) within 550 nucleotides of the 5′ end of the Ad35 genome that functionally disrupt the Ad35 packaging signal but not the 5′ Ad35 inverted terminal repeat (ITR).
10. A method of producing a recombinant helper dependent adenoviral serotype 35 (Ad35) donor vector, the method including isolating the recombinant helper dependent Ad35 donor vector from a culture of cells, wherein the cells include: a recombinant Ad35 helper genome including: a nucleic acid sequence encoding an Ad35 fiber shaft; a nucleic acid sequence encoding an Ad35 fiber knob; and recombinase direct repeats (DRs) within 550 nucleotides of the 5′ end of the Ad35 genome that functionally disrupt the Ad35 packaging signal but not the 5′ Ad35 inverted terminal repeat (ITR), and a recombinant Ad35 donor genome including: a 5′ Ad35 ITR; a 3′ Ad35 ITR; an Ad35 packaging sequence; and a nucleic acid sequence encoding at least one heterologous expression product.
11. The recombinant Ad35 vector production system, helper vector, helper genome, donor vector, or method of any one of embodiments 1˜4 or 6-10, wherein: the Ad35 fiber knob includes a wild-type Ad35 fiber knob, or the Ad35 fiber knob includes an engineered Ad35 fiber knob, wherein the engineered fiber knob includes a mutation that increases affinity of the fiber knob with CD46.
12. The recombinant Ad35 vector production system, helper vector, helper genome, donor vector, or method of embodiment 11, wherein the mutation: includes a mutation selected from Ile192Val, Asp207Gly (or Glu207Gly), Asn217Asp, Thr226Ala, Thr245Ala, Thr254Pro, Ile256Leu, Ile256Val, Arg259Cys, and Arg279His; or includes each of mutations Ile192Val, Asp207Gly (or Glu207Gly), Asn217Asp, Thr226Ala, Thr245Ala, Thr254Pro, Ile256Leu, Ile256Val, Arg259Cys, and Arg279His.
13. The recombinant Ad35 vector production system, donor genome, donor vector, or method of any one of embodiments 1, 4-7, or 10-12, wherein the heterologous expression product includes a therapeutic expression product operably linked with a regulatory sequence, optionally wherein the therapeutic expression product includes: (a) a β-globin protein or γ-globin protein; (b) an antibody or an immunoglobulin chain thereof, optionally wherein the antibody includes an anti-CD33 antibody; (c) a first antibody or an immunoglobulin chain thereof and a second antibody or an immunoglobulin chain thereof, optionally wherein the antibody includes an anti-CD33 antibody; (d) a CRISPR-associated RNA-guided endonuclease and/or a guide RNA (gRNA), optionally wherein the CRISPR-associated RNA-guided endonuclease includes Cas9 or cpf1; (e) a base editor and/or a gRNA, optionally wherein the base editor includes a cytosine base editor (CBE) or adenine base editor (ABE), optionally wherein the base editor includes a catalytically disabled nuclease selected from a disabled Cas9 and a disabled cpf1; (f) a coagulation factor or a protein that blocks or reduces viral infection, optionally wherein the therapeutic expression produce includes a Factor VII replacement protein or a Factor VIII replacement protein; (g) a checkpoint inhibitor; (h) chimeric antigen receptor or engineered T cell receptor; or (i) a protein selected from the group consisting of γC, JAK3, IL7RA, RAG1, RAG2, DCLRE1C, PRKDC, LIG4, NHEJ1, CD3D, CD3ε, CD3Z, CD3G, PTPRC, ZAP70, LCK, AK2, ADA, PNP, WHN, CHD7, ORAI1, STIM1, CORO1A, CIITA, RFXANK, RFX5, RFXAP, RMRP, DKC1, TERT, TINF2, DCLRE1B, SLC46A1, FancA, FancB, FancC, FancD1, FancD2, FancE, FancF, FancG, Fancl, FancJ, FancL, FancM, FancN, FancO, FancP, FancQ, FancR, FancS, FancT, FancU, FancV, FancW, soluble CD40, CTLA, Fas L, an antibody to PD-L1, an antibody to CD4, an antibody to CD5, an antibody to CD7, an antibody to CD52, an antibody to IL-1, an antibody to IL-2, an antibody to IL-4, an antibody to IL-6, an antibody to IL-10, an antibody to TNF, an antibody to a TCR specifically present on autoreactive T cells, a globin family gene, WAS, phox, dystrophin, pyruvate kinase, CLN3, ABCD1, arylsulfatase A, SFTPB, SFTPC, NLX2.1, ABCA3, GATA1, a ribosomal protein gene, TERT, TERC, DKC1, TINF2, CFTR, LRRK2, PARK2, PARK7, PINK1, SNCA, PSEN1, PSEN2, APP, SOD1, TDP43, FUS, ubiquilin 2, and/or C9ORF72, optionally wherein the protein includes a FancA protein.
14. The recombinant Ad35 vector production system, donor genome, donor vector, or method of embodiment 13(d) or 13(e), wherein: the gRNA binds a target nucleic acid sequence of HBG1, HBG2, and/or erythroid enhancer bcl11a, optionally wherein the gRNA is engineered to increase expression of γ-globin; or the gRNA binds a target nucleic acid sequence that encodes a portion of CD33, optionally wherein the CD33 includes human CD33.
15. The recombinant Ad35 vector production system, donor genome, donor vector, or method of embodiment 13, wherein the therapeutic expression product includes: a β-globin protein or a γ-globin protein; and a CRISPR system including a CRISPR-associated RNA-guided endonuclease; and one, two, or three of: a gRNA that binds a target nucleic acid sequence of HBG1; a gRNA that binds a target nucleic acid sequence of HBG2; and/or a gRNA that binds a target nucleic acid sequence of Bcl11a, optionally wherein the gRNA is engineered to increase expression of γ-globin.
16. The recombinant Ad35 vector production system, donor genome, donor vector, or method of embodiment 13, wherein the regulatory sequence(s) include a promoter, optionally wherein the promoter includes a β-globin promoter, optionally wherein the β-globin promoter has a length of about 1.6 kb and/or includes a nucleic acid according to positions 5228631-5227023 of chromosome 11.
17. The recombinant Ad35 vector production system, donor genome, donor vector, or method of embodiment 13, wherein the regulatory sequence(s) include a Locus Control Region (LCR), optionally wherein the LCR includes a β-globin LCR
18. The recombinant Ad35 vector production system, donor genome, donor vector, or method of embodiment 13, wherein the β-globin LCR:
includes β-globin LCR DNAse I hypersensitive sites (HS) including or consisting of HS1, HS2, HS3, and HS4, optionally wherein the β-globin LCR has a length of about 4.3 kb;
includes β-globin LCR DNAse I HS including HS1, HS2, HS3, HS4, and HS5, optionally wherein the β-globin LCR has a length of about 21.5 kb; or wherein the β-globin LCR includes a sequence according to positions 5292319-5270789 of chromosome 11.
19. The recombinant Ad35 vector production system, donor genome, donor vector, or method of embodiment 13 or 14, wherein the regulatory sequence(s) include a 3′HS1, optionally wherein the 3′HS1 includes a sequence according to positions 5206867-5203839 of chromosome 11.
20. The recombinant Ad35 vector production system, donor genome, donor vector, or method of any one of embodiments 13-19, wherein the regulatory sequence(s) include an miRNA binding site, optionally wherein: the miRNA binding site includes a binding site for an miRNA naturally expressed by a species of interest; the miRNA demonstrates differential occupancy profiles in the blood and a tumor microenvironment or target tissue, optionally wherein the occupancy profile is higher in blood than in the tumor microenvironment or target tissue; the miRNA binding site includes an miR423-5, miR423-5p, miR42-2, miR181c, miR125a, or miR15a binding sites; and/or the miRNA binding sites include an miR187 or miR218 binding sites.
21. The recombinant Ad35 vector production system, donor genome, donor vector, or method of any one of embodiments 1, 4-7, or 10-21, wherein the nucleic acid encoding the heterologous expression product is part of a payload further including an integration element, optionally wherein the integration element includes an expression product.
22. The recombinant Ad35 vector production system, donor genome, donor vector, or method of embodiment 21, wherein the integration element is engineered for integration into a target genome by homologous recombination, wherein the integration element is flanked by homology arms that correspond to contiguously linked sequences of the target genome, optionally wherein: the homology arms are between 0.8 and 1.8 kb; and/or the homology arms are homologous to nucleic acid sequences of the target genome that flank a chromosomal safe harbor locus, optionally wherein the safe harbor loci is selected from AAVS1, CCR5, HPRT, or Rosa.
23. The recombinant Ad35 vector production system, donor genome, donor vector, or method of embodiment 21, wherein the integration element is engineered for integration into a target genome by transposition, wherein the integration element is flanked by transposon inverted repeats (IRs), optionally wherein the transposon IRs are flanked by recombinase DRs.
24. The recombinant Ad35 vector production system, donor genome, donor vector, or method of embodiment 23, wherein: the transposon IRs are Sleeping Beauty (SB) IRs, optionally wherein the SB IRs are pT4 IRs; or the transposon IRs are piggyback, Mariner, frog prince, Tol2, TcBuster, or spinON IRs.
25. The recombinant Ad35 vector production system, donor genome, donor vector, or method of any one of embodiments 21-24, including a nucleic acid encoding a transposase that mediates transposition of the integration element flanked by the transposon IRs, optionally wherein the nucleic acid encoding the transposase is comprised by a support vector or support vector genome.
26. The recombinant Ad35 vector production system, donor genome, donor vector, or method of embodiment 25, wherein the transposase includes a Sleeping beauty, piggyback, Mariner, frog prince, Tol2, TcBuster, or spinON transposase, optionally wherein the transposase includes a Sleeping Beauty 100x (SB100x) transposase.
27. The recombinant Ad35 vector production system, donor genome, donor vector, or method of embodiment 25 or 26, wherein the nucleic acid encoding the transposase is operably linked with a PGK promoter.
28. The recombinant Ad35 vector production system, helper vector, helper genome, or method of any one of embodiments 1-3 or 6-27, wherein the recombinase DRs that flank at least a portion of the Ad35 packaging sequence and/or are within 550 nucleotides of the 5′ end of the Ad35 genome and functionally disrupt the Ad35 packaging signal but not the 5′ Ad35 ITR are FRT, loxP, rox, vox, AttB, or AttP sites.
29. The recombinant Ad35 vector production system, helper vector, helper genome, or method of embodiment 28, wherein a nucleic acid encoding a recombinase for excision of the at least portion of the Ad35 packaging sequence is encoded by a nucleic acid sequence of a cell including the helper genome.
30. The recombinant Ad35 vector production system, helper vector, helper genome, or method of any one of embodiments 23-29, wherein the recombinase DRs that flank the transposon IRs are FRT, loxP, rox, vox, AttB, or AttP sites.
31. The recombinant Ad35 vector production system, helper vector, helper genome, or method of any one of embodiments 21-28, wherein a nucleic acid encoding a recombinase for excision of the nucleic acid including the integration element is comprised by a support vector or support vector genome.
32. The recombinant Ad35 vector production system, helper vector, helper genome, or method of embodiment 29 or 31, wherein the recombinase includes a Flp, Cre, Dre, Vika, or PhiC31 recombinase.
33. The recombinant Ad35 vector production system, helper vector, helper genome, or method of embodiment 32, wherein the nucleic acid encoding the recombinase is operably linked with an EF1α promoter.
34. The recombinant Ad35 vector production system, helper vector, helper genome, or method of any one of embodiments 21-33, wherein the payload includes an integration element including the heterologous expression product, wherein the heterologous expression product includes a β-globin protein operably linked with a β-globin promoter and a β-globin long LCR, wherein the integration element is flanked by SB IRs, and wherein the SB IRs are flanked by recombinase DRs, optionally wherein the recombinase DRs are FRT sites.
35. The recombinant Ad35 vector production system, helper vector, helper genome, or method of any one of embodiments 21-34, wherein the payload includes: an integration element, and a conditionally expressed nucleic acid sequence that encodes an expression product, is not comprised by the integration element, and is positioned such that it is rendered nonfunctional by integration of the integration element into a target genome.
36. The recombinant Ad35 vector production system, helper vector, helper genome, or method of embodiment 35, wherein the expression product encoded by the conditionally expressed nucleic acid sequence includes a CRISPR system component or a base editor system component, optionally wherein the component includes a CRISPR-associated RNA-guided endonuclease, a base editor enzyme, or a gRNA.
37. The recombinant Ad35 vector production system, helper vector, helper genome, or method of any one of embodiments 21-36, wherein the payload includes a selection cassette, optionally wherein the selection cassette is comprised by the integration element.
38. The recombinant Ad35 vector production system, helper vector, helper genome, or method of embodiment 37, wherein the selection cassette includes a nucleic acid sequence encoding mgmt^{P140K} or wherein the selection cassette includes a nucleic acid sequence encoding an anti-CD33 shRNA.
39. The recombinant Ad35 vector production system, helper vector, helper genome, or method of any one of embodiments 1-3 or 6-38, wherein the at least portion of the Ad35 packaging sequence flanked by recombinase DRs corresponds to nucleotides 138-481 of the Ad35 sequence according to Gen Bank Accession No. AX049983.
40. The recombinant Ad35 vector production system, helper vector, helper genome, or method of any one of embodiments 1-3 or 6-38, wherein the at least portion of the Ad35 packaging sequence flanked by recombinase DRs corresponds to: nucleotides 179-344; nucleotides 366-481; nucleotides 155-481; nucleotides 159-480; nucleotides 159-446; nucleotides 180-480; nucleotides 207-480; nucleotides 140-446; nucleotides 159-446; nucleotides 180-446; nucleotides 202-446; nucleotides 159-481; nucleotides 180-384; nucleotides 180-481; or nucleotides 207-481. of the Ad35 sequence according to Gen Bank Accession No. AX049983.
41. The recombinant Ad35 vector production system, helper vector, helper genome, or method of any one of embodiments 1-3 or 6-40, wherein the recombinase DRs are LoxP sites.
42. The helper vector or helper genome of any one of embodiments 2, 3, 8, or 9, wherein the Ad35 helper genome includes Ad5 E4orf6 for amplification in 293 T cells.
43. The helper vector or helper genome of any one of embodiments 2, 3, 8, or 9, wherein the helper genome includes or generates the sequence as set forth in any one of SEQ ID NOs: 51-65.
44. A cell including the helper vector, the helper genome, the donor vector, or the donor genome of any one of embodiments 2-5, 8, or 9, optionally wherein the cell is a HEK293 cell.
45. A cell including the donor genome of any one of embodiments 1, 4, 6, 7, 10, 13-27 or 44 optionally wherein the cell is an erythrocyte, optionally wherein the cell is a hematopoietic stem cell, T-cell, B-cell, or myeloid cell, optionally wherein the cell secretes the expression product.
46. The method of any one of embodiments 6 or 10-41, wherein the cells are HEK293 cells.
47. A method of modifying a cell, the method including contacting the cell with an Ad35 donor vector according to any one of embodiments 5 or 11-27.
48. A method of modifying a cell of a subject, the method including administering to the subject an Ad35 donor vector according to any one of embodiments 5 or 11-27, optionally wherein the method does not include isolation of the cell from the subject.
49. A method of treating a disease or condition in a subject in need thereof, the method including administering to the subject an Ad35 donor vector according to any one of embodiments 5 or 11-27, optionally wherein the administration is intravenous.
50. The method of embodiment 49, wherein the method includes administering to the subject a mobilization agent, optionally wherein the mobilization agent includes one or more of granulocyte-colony stimulating factor, GM-CSF, S-CSF, a CXCR4 antagonist, and a CXCR2 agonist, optionally wherein the CXCR4 antagonist includes AMD3100 and/or wherein the CXCR2 agonist includes GRO-β.
51. The method of embodiment 49 or 50, wherein the Ad35 donor vector includes a selection cassette, optionally wherein the method further includes administering a selection agent to the subject, optionally wherein the selection cassette encodes mgmt^{P140K} and the selection agent includes O⁶BG/BCN U.
52. The method of any one of embodiments 49-51, wherein the method further includes administering to the subject an immune suppression agent, optionally wherein the immune suppression regimen includes a steroid, an IL-6 receptor antagonist, and/or an IL-1R receptor antagonist, optionally wherein the steroid includes a glucocorticoid or dexamethasone.
53. The method of any one of embodiments 49-52, wherein the Ad35 donor vector includes an integration element and the method causes integration and/or expression of a copy of the integration element thereof in at least 20%, 30%, 40%, 50%, 60%, 70%, 80%, 90%, or 95% of cells expressing CD46, in at least 20%, 30%, 40%, 50%, 60%, 70%, 80%, 90%, or 95% of hematopoietic stem cells, and/or in at least 20%, 30%, 40%, 50%, 60%, 70%, 80%, 90%, or 95% of erythroid Ter119⁺ cells.
54. The method of any one of embodiments 49-53, wherein the method causes integration of an average of at least 2 copies or at least 2.5 copies of the integration element in target cell genomes including at least 1 copy of the integration element.
55. The method of any one of embodiments 49-54, wherein the method causes expression of an expression product encoded by the payload or an integration element thereof at a level that is at least about 20% of the level of reference or at least about 25% of the level of a reference, optionally wherein the reference is expression of an endogenous reference protein in the subject or in a reference population.
56. The method of any one of embodiments 49-55, wherein the disease or condition includes a hemoglobinopathy, a platelet disorder, anemia, an immune deficiency a coagulation factor deficiency, Fanconi anemia, alpha-1 antitrypsin deficiency, sickle cell anemia, thalassemia, thalassemia intermedia, hemophilia A, hemophilia B, von Willebrand Disease, Factor V Deficiency, Factor VII Deficiency, Factor X Deficiency, Factor XI Deficiency, Factor XII Deficiency, Factor XIII Deficiency, Bernard-Soulier Syndrome, Gray Platelet Syndrome, or mucopolysaccharidosis.
57. The method of any one of embodiments 49-56, wherein the subject is a subject suffering from cancer and the method treats, prevents, or delays cancer, or delays cancer recurrence, optionally wherein the subject is a carrier of one or more germ-line mutation associated with development of cancer, optionally wherein the cancer includes anaplastic astrocytoma, breast cancer, ovarian cancer, colorectal cancer, diffuse intrinsic brainstem glioma, Ewing sarcoma, glioblastoma multiforme, malignant glioma, melanoma, metastatic malignant melanoma, nasopharyngeal cancer, or a pediatric cancer, optionally wherein the subject has received or is administered O⁶BG, TMZ (temozolomide), and/or BCNU (Carmustine).
58. The method of any one of embodiments 49-57, wherein the disease or condition includes thalassemia intermedia, optionally wherein the vector or genome includes a nucleic acid encoding one or more expression products selected from: expression product(s) that increase or reactivate expression of endogenous γ-globin, optionally wherein the expression product(s) that increase or reactivate expression of endogenous γ-globin includes a CRISPR-associated RNA-guided endonuclease or base editor and one or more of: a gRNA that binds a nucleic acid sequence of HBG1 and is engineered to increase expression from a coding sequence operably linked with the target nucleic acid sequence; a gRNA that binds a nucleic acid sequence of HBG2 and is engineered to increase expression from a coding sequence operably linked with the target nucleic acid sequence; and a gRNA that binds a nucleic acid sequence of erythroid enhancer bcl11a and is engineered to reduce BCL11A expression; γ-globin; and β-globin, optionally wherein the method reduces a symptom of thalassemia intermedia and/or treats thalassemia intermedia and/or increases HbF.

[0744] A second set of exemplary embodiments can include the following:

1. A recombinant serotype 35 adenovirus (Ad35) vector targeting CD46 for in vivo gene editing of hematopoietic stem cells.
2. The recombinant Ad35 vector of embodiment 1, wherein the fiber knob protein of the vector includes mutations that increase CD46 binding.
3. The recombinant Ad35 vector of embodiment 2, wherein the fiber knob protein mutations are selected from one or more of Asn217Asp, Thr254Pro, Ile256Leu, Asp207Gly (or Glu207Gly), Thr245Ala, Thr226Ala, Ile192Val, Ile256Val, Arg259Cys, and Arg279His.
4. The recombinant Ad35 vector of embodiment 2, wherein the fiber knob protein mutations include Asn217Asp, Thr254Pro, Ile256Leu, Asp207Gly (or Glu207Gly), Thr245Ala, Thr226Ala, Ile192Val, Ile256Val, Arg259Cys, and Arg279His.
5. The recombinant Ad35 vector of embodiment 2, wherein the fiber knob protein mutations consist of Asn217Asp, Thr254Pro, Ile256Leu, Asp207Gly (or Glu207Gly), Thr245Ala, Thr226Ala, Ile192Val, Ile256Val, Arg259Cys, and Arg279His.
6. The recombinant Ad35 vector of embodiment 1, including an miRNA control system that regulates expression of encoded genes in vivo.
7. The recombinant Ad35 vector of embodiment 6, wherein the miRNA control system consists of miRNA target sites with differential occupancy profiles in the blood and a tumor microenvironment or target tissue.
8. The recombinant Ad35 vector of embodiment 7, wherein the occupancy profile is higher in blood than in the tumor microenvironment or target tissue.
9. The recombinant Ad35 vector of embodiment 6, wherein the miRNA target sites include miR423-5, miR423-5p, miR42-2, miR181c, miR125a, and/or miR15a.
10. The recombinant Ad35 vector of embodiment 6, wherein the miRNA target sites control the expression of Cas9.
11. The recombinant Ad35 vector of embodiment 6, wherein the miRNA target sites include miR187, and/or miR218.
12. The recombinant Ad35 vector of embodiment 1, including nucleotides encoding CRISPR components to mediate DNA breaks and/or to activate endogenous gene expression.
13. The recombinant Ad35 vector of embodiment 12, wherein the CRISPR components include a nuclease and guide RNA.
14. The recombinant Ad35 vector of embodiment 13, wherein the nuclease includes Cas9 or cpf1.
15. The recombinant Ad35 vector of embodiment 12, wherein the CRISPR components include a catalytically disabled nuclease.
16. The recombinant Ad35 vector of embodiment 15, wherein the catalytically disabled nuclease includes a disabled Cas9 or a disabled cpf1.
17. The recombinant Ad35 vector of embodiment 15, wherein the catalytically disabled nuclease is fused to guide RNA and a cytidine or adenine deaminase or transaminase.
18. The recombinant Ad35 vector of embodiment 13, wherein the guide RNAs bind HBG1 promoter, HBG2 promoter, and/or bcl11a enhancer.
19. The recombinant Ad35 vector of embodiment 1, including a positive selection marker.
20. The recombinant Ad35 vector of embodiment 19, wherein the positive selection marker includes an anti-CD33 shRNA cassette and/or an MGMT^{P140K} cassette.
21. The recombinant Ad35 vector of embodiment 1, including homology arms.
22. The recombinant Ad35 vector of embodiment 21, wherein the homology arms are between 0.8 and 1.8 kb.
23. The recombinant Ad35 vector of embodiment 21, wherein the homology arms are specific to a chromosomal safe harbor loci.
24. The recombinant Ad35 vector of embodiment 23, wherein the chromosomal safe harbor loci is selected from AAVS1, CCR5, HPRT, or Rosa.
25. The recombinant Ad35 vector of embodiment 1, including inverted repeat sequences recognized by a transposase.
26. The recombinant Ad35 vector of embodiment 1, including a nucleotide sequence encoding a transposase.
27. The recombinant Ad35 vector of embodiment 26, wherein the transposase includes Sleeping beauty, piggyback, Mariner, frog prince, Tol2, TcBuster, and spinON.
28. The recombinant Ad35 vector of embodiment 26, wherein the transposase includes a hyperactive Sleeping beauty transposase or a hyperactive piggyBac transposase.
29. The recombinant Ad35 vector of embodiment 28, wherein the hyperactive Sleeping beauty transposase includes SB100X.
30. The recombinant Ad35 vector of embodiment 26, wherein the nucleotide sequence encoding the transposase is under the transcriptional control of a PGK promoter.
31. The recombinant Ad35 vector of embodiment 1, including recombinase recognition sequences.
32. The recombinant Ad35 vector of embodiment 31, wherein the recombinase recognition sequences include Frt, lox, rox, vox, AttB, or AttP.
33. The recombinant Ad35 vector of embodiment 1, including a nucleotide sequence encoding a recombinase.
34. The recombinant Ad35 vector of embodiment 33, wherein the recombinase includes Flp, Cre, Dre, Vika, or PhiC31.
35. The recombinant Ad35 vector of embodiment 33, wherein the nucleotide sequence encoding the recombinase is under the transcriptional control of an EF1α promoter.
36. The recombinant Ad35 vector of any one of embodiments 1-35 including a therapeutic cassette.
37. The recombinant Ad35 vector of embodiment 36, wherein the therapeutic cassette includes a therapeutic gene or encodes a therapeutic gene product selected from yC, JAK3, IL7RA, RAG1, RAG2, DCLREIC, PRKDC, LIG4, NHEJ1, CD3D, CD3ε, CD3Z, CD3G, PTPRC, ZAP70, LCK, AK2, ADA, PNP, WHN, CHD7, ORAI1, STIM1, COROIA, CIITA, RFXANK, RFX5, RFXAP, RMRP, DKC1, TERT, TINF2, DCLRE1B, SLC46A1, FancA, FancB, FancC, FancD1 (BRCA2), FancD2, FancE, FancF, FancG, Fancl, FancJ (BRIP1), FancL, FancM, FancN (PALB2), FancO (RAD51C), FancP (SLX4), FancQ (ERCC4), FancR (RAD51), FancS (BRCA1), FancT (UBE2T), FancU (XRCC2), FancV (MAD2L2), FancW (RFWD3), soluble CD40, CTLA, Fas L, an antibody to PD-L1, an antibody to CD4, an antibody to CD5, an antibody to CD7, an antibody to CD52, an antibody to IL-1, an antibody to IL-2, an antibody to IL-4, an antibody to IL-6, an antibody to IL-10, an antibody to TNF, an antibody to a TCR specifically present on autoreactive T cells, a globin family gene, WAS, phox, dystrophin, pyruvate kinase, CLN3, ABCD1, arylsulfatase A, SFTPB, SFTPC, NLX2.1, ABCA3, GATA1, a ribosomal protein gene, TERT, TERC, DKC1, TINF2, CFTR, LRRK2, PARK2, PARK7, PINK1, SNCA, PSEN1, PSEN2, APP, SOD1, TDP43, FUS, ubiquilin 2, and/or C9ORF72.
38. The recombinant Ad35 vector of embodiment 36, wherein the therapeutic cassette includes a therapeutic gene that includes or encodes common gamma ( [symbol] ) chain, FancA, [symbol] -globin, and/or FVIII.
39. The recombinant Ad35 vector of embodiment 36, wherein the therapeutic cassette includes a therapeutic gene that encodes a chimeric antigen receptor, an engineered T cell receptor, and/or a therapeutic antibody.
40. The recombinant Ad35 vector of embodiment 38, wherein the therapeutic gene is under the transcriptional control of a β-globin promoter.
41. The recombinant Ad35 vector of embodiment 38, wherein the therapeutic gene is under the transcriptional control of a β-globin locus control region (LCR) including DNAse I hypersensitive sites (HS) consisting of HS1, HS2, HS3, and HS4.
42. The recombinant Ad35 vector of embodiment 41, wherein the β-globin LCR is approximately 4.3 kb.
43. The recombinant Ad35 vector of embodiment 41, wherein the therapeutic gene is further under the transcriptional control of a β-globin promoter.
44. The recombinant Ad35 vector of embodiment 43, wherein the β-globin promoter is approximately 1.6 kb.
45. The recombinant Ad35 vector of embodiment 44, wherein the β-globin promoter has the sequence of positions 5228631-5227023 of chromosome 11.
46. The recombinant Ad35 vector of embodiment 38, wherein the therapeutic gene is under the transcriptional control of a β-globin long LCR including HS1, HS2, HS3, HS4, and HS5.
47. The recombinant Ad35 vector of embodiment 46, wherein the β-globin long LCR is approximately 21.5 kb.
48. The recombinant Ad35 vector of embodiment 47, wherein the β-globin long LCR has the sequence of positions 5292319-5270789 of chromosome 11.
49. The recombinant Ad35 vector of embodiment 46, wherein the therapeutic gene is further under the transcriptional control of a β-globin promoter.
50. The recombinant Ad35 vector of embodiment 49, wherein the β-globin promoter is approximately 1.6 kb.
51. The recombinant Ad35 vector of embodiment 50, wherein the β-globin promoter has the sequence of positions 5228631-5227023 of chromosome 11.
52. The recombinant Ad35 vector of embodiment 46, further including a 3′HS1.
53. The recombinant Ad35 vector of embodiment 52, wherein the 3′HS1 has the sequence of positions 5206867-5203839 of chromosome 11.
54. The recombinant Ad35 vector of embodiment 1, including at least a 30 kb transposon.
55. The recombinant Ad35 vector of embodiment 1, including a 32.4 kb transposon.
56. The recombinant Ad35 vector of embodiment 1, generated using a helper virus.
57. The recombinant Ad35 vector of embodiment 56, wherein the helper virus includes the Ad5 E4orf6 for amplification in 293 T cells.
58. The recombinant Ad35 vector of embodiment 56, wherein the helper virus includes Ad35 signaling sequences and packaging sequences.
59. The recombinant Ad35 vector of embodiment 56, wherein the helper virus includes an anti-CRISPR (acr) expression cassette to prevent expression of CRISPR components during viral manufacturing.
60. The recombinant Ad35 vector of embodiment 56, wherein the helper vector includes or generates the sequence of SEQ ID NOs: 51-64.
61. An erythrocyte genetically modified to express a therapeutic protein.
62. An erythrocyte of embodiment 61, wherein the therapeutic protein includes a coagulation factor or a protein that blocks or reduces viral infection.
63. An erythrocyte of embodiment 61, wherein the erythrocyte secretes the therapeutic protein.
64. Use of a recombinant Ad35 vector or erythrocyte of any of embodiments 1-63, to increase HbF reactivation by simultaneously targeting the erythroid bcl11a-enhancer and the HBG promoter regions.
65. Use of a recombinant Ad35 vector or erythrocyte of any of embodiments 1-63, for a combination of γ-globin gene addition and endogenous γ-globin gene reactivation.
66. Use of a recombinant Ad35 vector of or erythrocyte of any of embodiments 1-63, for in vivo CRISPR genome engineering.
67. Use of a recombinant Ad35 vector or erythrocyte of any of embodiments 1-63, to provide a therapeutic gene.
68. Use of a recombinant Ad35 vector or erythrocyte of any of embodiments 1-63, to treat a (i) hemoglobinopathy, (ii) Fanconi anemia, (iii) a coagulation factor deficiency optionally selected from hemophilia A, hemophilia B, or Von Willebrand Disease, (iv) a platelet disorder, (v) anemia, (vi) alpha-1 antitrypsin deficiency, or (v) an immune deficiency.
69. Use of a recombinant Ad35 vector or erythrocyte of any of embodiments 1-63, to treat thalassemia.
70. Use of a recombinant Ad35 vector or erythrocyte of any of embodiments 1-63, to treat cancer, prevent or delay cancer recurrence or prevent or delay cancer onset in carriers of high-risk germ-line mutations, optionally wherein the cancer is breast cancer or ovarian cancer.
71. Use of a recombinant Ad35 vector or erythrocyte of any of embodiments 1-63, for self-inactivation of CRISPR/Cas9.
72. Use of a recombinant Ad35 vector or erythrocyte of any of embodiments 1-3, for targeted integration using HDAd as donor vectors with a self-releasing cassette.
73. A use of any of embodiments 64-72 including mobilization.
74. A use of embodiment 49, wherein the mobilization includes administration of Gro-beta, GM-CSF, S-CSF, and/or AMD3100.
75. A use of any of embodiments 64-72 including administering a steroid, an IL-6 receptor antagonist, and/or an IL-1R receptor antagonist to a subject receiving the Ad35 vector and/or erythrocyte.
76. The use of embodiment 75, wherein the steroid includes a glucocorticoid.
77. The use of embodiment 75, wherein the steroid includes dexamethasone.
78. A use of any of embodiments 64-72 including administering O6BG and TMZ (temozolomide) or BCNU (Carmustine) to a subject receiving the Ad35 vector and/or erythrocyte.
79. A use of embodiment 78, wherein the subject is receiving O6BG and TMZ or BCNU as a treatment for anaplastic astrocytoma, breast cancer, colorectal cancer, diffuse intrinsic brainstem glioma, Ewing sarcoma, glioblastoma multiforme (GBM), malignant glioma, melanoma, metastatic malignant melanoma, nasopharyngeal cancer, or a pediatric cancer.

[0745] A third set of exemplary embodiments can include the following:

1. A recombinant serotype 35 adenovirus (Ad35) vector targeting CD46 for in vivo gene editing of hematopoietic stem cells.
2. The recombinant Ad35 vector of embodiment 1, wherein the fiber knob protein of the vector includes mutations that increase CD46 binding.
3. The recombinant Ad35 vector of embodiment 2, wherein the fiber knob protein mutations are selected from one or more of Asn217Asp, Thr254Pro, Ile256Leu, Asp207Gly (or Glu207Gly), Thr245Ala, Thr226Ala, Ile192Val, Ile256Val, Arg259Cys, and Arg279His.
4. The recombinant Ad35 vector of embodiment 2, wherein the fiber knob protein mutations include Asn217Asp, Thr254Pro, Ile256Leu, Asp207Gly (or Glu207Gly), Thr245Ala, Thr226Ala, Ile192Val, Ile256Val, Arg259Cys, and Arg279His.
5. The recombinant Ad35 vector of embodiment 2, wherein the fiber knob protein mutations consist of Asn217Asp, Thr254Pro, Ile256Leu, Asp207Gly (or Glu207Gly), Thr245Ala, Thr226Ala, Ile192Val, Ile256Val, Arg259Cys, and Arg279His.
6. The recombinant Ad35 vector of embodiment 1, including an miRNA control system that regulates expression of encoded genes in vivo.
7. The recombinant Ad35 vector of embodiment 6, wherein the miRNA control system consists of miRNA target sites with differential occupancy profiles in the blood and a tumor microenvironment or target tissue.
8. The recombinant Ad35 vector of embodiment 7, wherein the occupancy profile is higher in blood than in the tumor microenvironment or target tissue.
9. The recombinant Ad35 vector of embodiment 6, wherein the miRNA target sites include miR423-5, miR423-5p, miR42-2, miR181c, miR125a, and/or miR15a.
10. The recombinant Ad35 vector of embodiment 6, wherein the miRNA target sites control the expression of Cas9.
11. The recombinant Ad35 vector of embodiment 6, wherein the miRNA target sites include miR187, and/or miR218.
12. The recombinant Ad35 vector of embodiment 1, including nucleotides encoding CRISPR components to mediate DNA breaks and/or to activate endogenous gene expression.
13. The recombinant Ad35 vector of embodiment 12, wherein the CRISPR components include a nuclease and guide RNA.
14. The recombinant Ad35 vector of embodiment 13, wherein the nuclease includes Cas9 or cpf1.
15. The recombinant Ad35 vector of embodiment 12, wherein the CRISPR components include a catalytically disabled nuclease.
16. The recombinant Ad35 vector of embodiment 15, wherein the catalytically disabled nuclease includes a disabled Cas9 or a disabled cpf1.
17. The recombinant Ad35 vector of embodiment 15, wherein the catalytically disabled nuclease is fused to guide RNA and a cytidine or adenine deaminase or transaminase.
18. The recombinant Ad35 vector of embodiment 13, wherein the guide RNAs bind HBG1, HBG2, and/or Bc11a.
19. The recombinant Ad35 vector of embodiment 1, including a positive selection marker.
20. The recombinant Ad35 vector of embodiment 19, wherein the positive selection marker includes an anti-CD33 shRNA cassette and/or an MGMTPl⁴Ok cassette.
21. The recombinant Ad35 vector of embodiment 1, including homology arms.
22. The recombinant Ad35 vector of embodiment 21, wherein the homology arms are between 0.8 and 1.8 kb.
23. The recombinant Ad35 vector of embodiment 21, wherein the homology arms are specific to a chromosomal safe harbor loci.
24. The recombinant Ad35 vector of embodiment 23, wherein the chromosomal safe harbor loci is selected from AAVS1, CCR5, HPRT, or Rosa.
25. The recombinant Ad35 vector of embodiment 1, including inverted repeat sequences recognized by a transposase.
26. The recombinant Ad35 vector of embodiment 1, including a nucleotide sequence encoding a transposase.
27. The recombinant Ad35 vector of embodiment 26, wherein the transposase includes Sleeping beauty, piggyback, Mariner, frog prince, Tol2, TcBuster, and spinON.
28. The recombinant Ad35 vector of embodiment 26, wherein the transposase includes a hyperactive Sleeping beauty transposase or a hyperactive piggybac transposase.
29. The recombinant Ad35 vector of embodiment 28, wherein the hyperactive Sleeping beauty transposase includes SB100X.
30. The recombinant Ad35 vector of embodiment 26, wherein the nucleotide sequence encoding the transposase is under the transcriptional control of a PGK promoter.
31. The recombinant Ad35 vector of embodiment 1, including recombinase recognition sequences.
32. The recombinant Ad35 vector of embodiment 31, wherein the recombinase recognition sequences include Frt, lox, rox, vox, AttB, or AttP.
33. The recombinant Ad35 vector of embodiment 1, including a nucleotide sequence encoding a recombinase.
34. The recombinant Ad35 vector of embodiment 33, wherein the recombinase includes Flp, Cre, Dre, Vika, or PhiC31.
35. The recombinant Ad35 vector of embodiment 33, wherein the nucleotide sequence encoding the recombinase is under the transcriptional control of an EF1α promoter.
36. The recombinant Ad35 vector of any one of embodiments 1-35 including a therapeutic cassette.
37. The recombinant Ad35 vector of embodiment 36, wherein the therapeutic cassette includes a therapeutic gene or encodes a therapeutic gene product selected from γC, JAK3, IL7RA, RAG1, RAG2, DCLREIC, PRKDC, LIG4, NHEJ1, CD3D, CD3ε, CD3Z, CD3G, PTPRC, ZAP70, LCK, AK2, ADA, PNP, WHN, CHD7, ORAI1, STIM1, COROIA, CIITA, RFXANK, RFX5, RFXAP, RMRP, DKC1, TERT, TINF2, DCLRE1B, SLC46A1, FancA, FancB, FancC, FancD1 (BRCA2), FancD2, FancE, FancF, FancG, Fancl, FancJ (BRIP1), FancL, FancM, FancN (PALB2), FancO (RAD51C), FancP (SLX4), FancQ (ERCC4), FancR (RAD51), FancS (BRCA1), FancT (UBE2T), FancU (XRCC2), FancV (MAD2L2), FancW (RFWD3), soluble CD40, CTLA, Fas L, an antibody to PD-L1, an antibody to CD4, an antibody to CD5, an antibody to CD7, an antibody to CD52, an antibody to IL-1, an antibody to IL-2, an antibody to IL-4, an antibody to IL-6, an antibody to IL-10, an antibody to TNF, an antibody to a TCR specifically present on autoreactive T cells, a globin family gene, WAS, phox, dystrophin, pyruvate kinase, CLN3, ABCD1, arylsulfatase A, SFTPB, SFTPC, NLX2.1, ABCA3, GATA1, a ribosomal protein gene, TERT, TERC, DKC1, TINF2, CFTR, LRRK2, PARK2, PARK7, PINK1, SNCA, PSEN1, PSEN2, APP, SOD1, TDP43, FUS, ubiquilin 2, and/or C9ORF72.
38. The recombinant Ad35 vector of embodiment 36, wherein the therapeutic cassette includes a therapeutic gene that includes or encodes common gamma (γ) chain, FancA, γ-globin, and/or FVIII.
39. The recombinant Ad35 vector of embodiment 36, wherein the therapeutic cassette includes a therapeutic gene that encodes a chimeric antigen receptor, an engineered T cell receptor, and/or a therapeutic antibody.
40. The recombinant Ad35 vector of embodiment 38, wherein the therapeutic gene is under the transcriptional control of a β-globin promoter.
41. The recombinant Ad35 vector of embodiment 38, wherein the therapeutic gene is under the transcriptional control of a β-globin locus control region (LCR) including DNAse I hypersensitive sites (HS) consisting of HS1, HS2, HS3, and HS4.
42. The recombinant Ad35 vector of embodiment 41, wherein the β-globin LCR is approximately 4.3 kb.
43. The recombinant Ad35 vector of embodiment 41, wherein the therapeutic gene is further under the transcriptional control of a β-globin promoter.
44. The recombinant Ad35 vector of embodiment 43, wherein the β-globin promoter is approximately 1.6 kb.
45. The recombinant Ad35 vector of embodiment 44, wherein the β-globin promoter has the sequence of positions 5228631-5227023 of chromosome 11.
46. The recombinant Ad35 vector of embodiment 38, wherein the therapeutic gene is under the transcriptional control of a β-globin long LCR including HS1, HS2, HS3, HS4, and HS5.
47. The recombinant Ad35 vector of embodiment 46, wherein the β-globin long LCR is approximately 21.5 kb.
48. The recombinant Ad35 vector of embodiment 47, wherein the β-globin long LCR has the sequence of positions 5292319-5270789 of chromosome 11.
49. The recombinant Ad35 vector of embodiment 46, wherein the therapeutic gene is further under the transcriptional control of a β-globin promoter.
50. The recombinant Ad35 vector of embodiment 49, wherein the β-globin promoter is approximately 1.6 kb.
51. The recombinant Ad35 vector of embodiment 50, wherein the β-globin promoter has the sequence of positions 5228631-5227023 of chromosome 11.
52. The recombinant Ad35 vector of embodiment 46, further including a 3′HS1.
53. The recombinant Ad35 vector of embodiment 52, wherein the 3′HS1 has the sequence of positions 5206867-5203839 of chromosome 11.
54. The recombinant Ad35 vector of embodiment 1, including at least a 30 kb transposon.
55. The recombinant Ad35 vector of embodiment 1, including a 32.4 kb transposon.
56. The recombinant Ad35 vector of embodiment 1, generated using a helper virus.
57. The recombinant Ad35 vector of embodiment 56, wherein the helper virus includes the Ad5 E4orf6 for amplification in 293 T cells.
58. The recombinant Ad35 vector of embodiment 56, wherein the helper virus includes Ad35 signaling sequences and packaging signals.
59. The recombinant Ad35 vector of embodiment 56, wherein the helper virus includes an anti-CRISPR (acr) expression cassette to prevent expression of CRISPR components during viral manufacturing.
60. The recombinant Ad35 vector of embodiment 56, wherein the helper vector includes or generates the sequence of any one of SEQ ID NOs: 51-65.
61. An erythrocyte genetically modified to express a therapeutic protein.
62. An erythrocyte of embodiment 61, wherein the therapeutic protein includes a coagulation factor or a protein that blocks or reduces viral infection.
63. An erythrocyte of embodiment 61, wherein the erythrocyte secretes the therapeutic protein.
64. Use of a recombinant Ad35 vector or erythrocyte of any of embodiments 1-63, to increase HbF reactivation by simultaneously targeting the erythroid bcl11a-enhancer and the HBG promoter regions.
65. Use of a recombinant Ad35 vector or erythrocyte of any of embodiments 1-63, for a combination of γ-globin gene addition and endogenous γ-globin gene reactivation.
66. Use of a recombinant Ad35 vector of or erythrocyte of any of embodiments 1-63, for in vivo CRISPR genome engineering.
67. Use of a recombinant Ad35 vector or erythrocyte of any of embodiments 1-63, to provide a therapeutic gene.
68. Use of a recombinant Ad35 vector or erythrocyte of any of embodiments 1-63, to treat a (i) hemoglobinopathy, (ii) Fanconi anemia, (iii) a coagulation factor deficiency optionally selected from hemophilia A, hemophilia B, or Von Willebrand Disease, (iv) a platelet disorder, (v) anemia, (vi) alpha-1 antitrypsin deficiency, or (v) an immune deficiency.
69. Use of a recombinant Ad35 vector or erythrocyte of any of embodiments 1-63, to treat thalassemia.
70. Use of a recombinant Ad35 vector or erythrocyte of any of embodiments 1-63, to treat cancer, prevent or delay cancer recurrence or prevent or delay cancer onset in carriers of high-risk germ-line mutations, optionally wherein the cancer is breast cancer or ovarian cancer.
71. Use of a recombinant Ad35 vector or erythrocyte of any of embodiments 1-63, for self-inactivation of CRISPR/Cas9.
72. Use of a recombinant Ad35 vector or erythrocyte of any of embodiments 1-3, for targeted integration using HDAd as donor vectors with a self-releasing cassette.
73. A use of any of embodiments 64-72 including mobilization.
74. A use of embodiment 49, wherein the mobilization includes administration of Gro-beta, GM-CSF, S-CSF, and/or AMD3100.
75. A use of any of embodiments 64-72 including administering a steroid, an IL-6 receptor antagonist, and/or an IL-1R receptor antagonist to a subject receiving the Ad35 vector and/or erythrocyte.
76. The use of embodiment 75, wherein the steroid includes a glucocorticoid.
77. The use of embodiment 75, wherein the steroid includes dexamethasone.
78. A use of any of embodiments 64-72 including administering O⁶BG and TMZ (temozolomide) or BCNU (Carmustine) to a subject receiving the Ad35 vector and/or erythrocyte.
79. A use of embodiment 78, wherein the subject is receiving O⁶BG and TMZ or BCNU as a treatment for anaplastic astrocytoma, breast cancer, colorectal cancer, diffuse intrinsic brainstem glioma, Ewing sarcoma, glioblastoma multiforme (GBM), malignant glioma, melanoma, metastatic malignant melanoma, nasopharyngeal cancer, or a pediatric cancer.

### VI. EXPERIMENTAL EXAMPLES

### Example 1. In Vivo Hematopoietic Stem Cell Gene Therapy Ameliorates Murine Thalassemia Intermedia

[0746] This example illustrates an in vivo HSPC gene therapy approach employing an integrating HDAd5/35++ vector expressing the human γ-globin gene in “healthy” human CD46-transgenic (CD46tg) mice; as a proof of concept, this approach is illustrated in a mouse model for Thalassemia intermedia (CD46^{+/+}/Hbbth-3 mice). This provides an alternative to traditional lentivirus vector ex vivo gene therapy for thalassemia. At least some of the information contained in this example was published in Wang et al., (J Clin Invest. 129(2):598-615, 2019; e-pub Nov. 13, 2018).

[0747] Thalassemia is one of the most common inherited diseases in humans worldwide (Weatherall, Ann N Y Acad Sci. 1202:17-23, 2010), resulting from absent (β0/β0) or deficient (β+/β+) β-globin chain synthesis. 60,000 children are born annually with β-thalassemia major. Without treatment, children with thalassemia major die in their first to second decade of life. In the absence of sufficient β-globin chain synthesis for hemoglobin tetramer formation, excess α-globin chains precipitate and form inclusions that cause the premature death of late erythroblasts in the bone marrow or reduce the half-life of circulating erythrocytes, generating the major hematological hallmarks of β-thalassemia, ineffective erythropoiesis and erythrocyte death. The resulting anemia stimulates the expansion of the hematopoietic compartment, producing erythroid hyperplasia and extramedullary hematopoiesis.

[0748] The major treatment modalities for β-thalassemia major consist of supportive care with lifelong transfusions of red blood cells (RBCs) and chelation to remove excess iron; or curative treatment with transplantation of allogeneic hematopoietic stem/progenitor cells (HSPCs). For patients lacking a well-matched donor or at risk to undergo an allogeneic HSPC transplantation, lentiviral vector wild-type β-globin or fetal γ-globin gene therapy has the potential for a cure bypassing the immunological risks of allogeneic transplantation. HSPC gene therapy with SIN-lentiviral globin vectors, incorporating micro-LCR cassettes, rescued β-thalassemia and sickle cell disease (SCD) phenotypes in animal models and in patient cells in vitro (Pstaha et al., Curr Gene Ther. 17(5):364-378, 2017). Based on this, a number of clinical trials for thalassemia and SCD are currently ongoing in Europe, Asia, and the United States (Pstaha et al., Curr Gene Ther. 17(5):364-378, 2017, Cavazanna-Calvo et al., Nature. 467(7313):318-322, 2010, Ferarri et al., Hematology/Oncology Clinics of North America: Gene Therapy. 31(5), Thompson et al., N Engl J Med. 378(16):1479-1493, 2018). While the data from these trials so far demonstrate long-term transfusion independence for the majority of patients having a β+ genotype, the cure of β0/β0 thalassemia still remains a challenge.

[0749] Despite the encouraging clinical results, current thalassemia gene therapy protocols are complex, involving the collection of HSPCs from donors/patients by leukapheresis, in vitro culture, transduction with lentivirus vectors carrying a β- or γ-globin expression cassette, and retransplantation into patients conditioned with full myeloablation. Besides the technical complexity, other disadvantages of this approach include (a) the necessity for culture in the presence of multiple cytokines, which can affect the pluripotency of hematopoietic stem cells (HSCs) and their engraftment potential; (b) the requirement for myeloablative regimens, as myeloablation in patients with chronic, nonmalignant diseases and preexisting organ damage, such as those with hemoglobinopathies, represents a critical risk factor associated with considerable hematopoietic and nonhematopoietic, early or late toxicity; and (c) the cost of the approach. The fact that thalassemia is prevalent in resource-poor countries demands a simpler and cheaper therapy approach.

[0750] A minimally invasive and readily translatable approach for in vivo HSPC gene delivery without leukapheresis, myeloablation, and HSPC transplantation has been developed (Richter et al., Blood. 2016; 128(18):2206-2217, Richter et al., Hematol Oncol Clin North Am. 31(5):771-785, 2017, Ren et al., Blood. 128(18):2194-219, 2016). It involves injections of G-CSF/AMD3100 to mobilize HSPCs from the bone marrow into the peripheral bloodstream and the intravenous injection of an integrating, helper-dependent adenovirus (HDAd5/35++) vector system. HDAd5/35++ vectors target human CD46, a receptor that is expressed on primitive HSCs (Richter et al., Blood. 128(18):2206-2217, 2016). In HDAd5/35++, all proteins except the fiber knob domain and shaft are derived from serotype 5; the fiber knob domain and shaft are derived from serotype 35; mutations that increase the affinity to CD46 are introduced into the Ad35 fiber knob (see WO 2010/0120541) and the ITR and packaging signal are derived from Ad5. In HdAd35++, all proteins are derived from serotype 35; mutations that increase the affinity to CD46 are introduced into the fiber knob and the ITR and packaging signal are derived from Ad35.

[0751] Transgene integration is achieved, in a random pattern, by a hyperactive Sleeping Beauty transposase (SB100X) (Mátés et al., Nat Genet. 41(6):753-761, 2009). It was demonstrated in mouse models, using GFP as a reporter gene, that HSPCs transduced in the periphery home back to the bone marrow, where they persist and stably express the reporter long-term in in vivo-transduced mice and secondary recipients (Richter et al., Blood. 2016; 128(18):2206-2217).

[0752] Given the high level of transgene marking required in order to phenotypically correct thalassemia, the in vivo HSPC transduction approach was optimized by inserting an MGMT^{P140K} expression cassette into HDAd5/35++ vectors. This allows for in vivo selection of gene-corrected progenitors with low doses of methylating agents, e.g., O⁶-benzylguanine (O⁶BG) plus bis-chloroethylnitrosourea (BCNU) or temozolomide (Beard et al., J Clin Invest. 120(7):2345-2354, 2010, Larochelle et al., J Clin Invest. 119(7):1952-1963, 2009, Trobridge et al., PLoS One. 7(9):e45173, 2012). It was previously shown that the combined in vivo transduction/selection approach was safe and resulted in stable GFP expression in up to 80% of peripheral blood cells, a level that was maintained in secondary recipients, indicating the stable transduction of self-renewing, multilineage, long-term repopulating HSCs (Wang et al., Mol Ther Methods Clin Dev. 8:52-64, 2018).

[0753] Herein the in vivo HSPC gene therapy approach was tested using an integrating HDAd5/35++vector expressing the human γ-globin gene in “healthy” human CD46-transgenic (CD46tg) mice and, as a proof of concept, in a mouse model for thalassemia intermedia (CD46^{+/+}/Hbbth-3 mice).

[0754] Materials and Methods. Reagents. The following reagents were used: G-CSF (Neupogen, Amgen), AMD3100 (Sigma-Aldrich), plerixafor (Mozobil, Genzyme Corp.), O⁶-BG and BCNU (Sigma-Aldrich), mycophenolate mofetil (CellCept Intravenous, Genentech), rapamycin (Rapamune/Sirolimus, Pfizer), and methylprednisolone (Pfizer).

[0755] HDAd vectors. The generation of the transposon vector HDAd-γ-globin/mgmt and the SB100X-expressing human embryonic kidney-293 cell-derived 116 cells (Palmer et al., Gene Therapy Protocols. Volume 1: Production and In vivo Applications of Gene Transfer Vectors (Methods in Molecular Biology):33-53, 2009) has been described previously (Li et al., Mol Ther Methods Clin Dev. 9:142-152, 2018). Helper virus contamination levels were found to be less than 0.05%. Titers were 6×10¹² to 12×10¹² vp/ml. All HDAd vectors used in this study contain chimeric fibers composed of the Ad5 fiber tail, the Ad35 fiber shaft, and the affinity-enhanced Ad35++fiber knob (Wang et al., J Virol. 82(21):10567-10579, 2008). All of the HDAd preparations had less than 1 copy wild-type virus in 10¹⁰ vp (measured by qPCR using the primers described elsewhere; Haeussler et al., PLoS One. 6(8):e23160, 2011).

[0756] Intracellular flow cytometry detecting human γ-globin expression. The FIX and PERM cell permeabilization kit (Thermo Fisher Scientific) was used, and the manufacturer's protocol was followed. Briefly, 1×10⁶ cells were resuspended in 100 μl FACS buffer (PBS supplemented with 1% FCS), 100 μl reagent A (fixation medium) was added and incubated for 2-3 minutes at room temperature, and 1 ml precooled absolute methanol was then added, mixed, and incubated on ice in the dark for 10 minutes. The samples were then washed with FACS buffer and resuspended in 100 μl reagent B (permeabilization medium) and 1 μg γ-globin antibody (Santa Cruz Biotechnology, catalog sc-21756 PE), incubated for 30 minutes at room temperature. After the wash, cells were resuspended in FACS buffer and analyzed. For erythroid and γ-globin double staining, cells were stained with APC anti-mouse Ter119 antibody (Ter119-APC, BioLegend, catalog 116212) first, and then washed and fixed with fixation medium as described above.

[0757] Globin HPLC. Individual globin chain levels were quantified on a Shimadzu Prominence instrument with an SPD-10AV diode array detector and an LC-10AT binary pump (Shimadzu). A 38%-60% gradient mixture of 0.1% trifluoroacetic acid in water/acetonitrile was applied at a rate of 1 ml/min using a Vydac C4 reversed-phase column (Hichrom).

[0758] Real-time reverse transcription PCR. Total RNA was extracted from 50-100 μl blood using TRIzol™ reagent (Thermo Fisher Scientific, Cat. #15596026) following the manufacturer's phenol-chloroform extraction method. QuantiTect reverse transcription kit (Qiagen, Cat. #205311) and Power SYBR Green PCR Master Mix (Thermo Fisher Scientific, Cat. #4367659) were used. Real-time quantitative PCR was performed on a StepOnePlus Real-Time PCR System (Applied Biosystems). The following primer pairs were used in this work: mouse RPL10 forward (SEQ ID NO: 189), and reverse (SEQ ID NO: 190); human γ-globin forward (SEQ ID NO: 191), and reverse (SEQ ID NO: 192); mouse β-major globin forward (SEQ ID NO: 193), and reverse (SEQ ID NO: 194).

[0759] Magnetic cell sorting. For the depletion of lineage-committed cells, the mouse Lineage Cell Depletion Kit (Miltenyi Biotec, Cat. #130-090-858) was used according to the manufacturer's instructions. For the selection of Ter119⁺ cells from the bone marrow of primary CD46^{+/+}/Hbbth-3 mice or CD46+ cells from the hematopoietic tissues of secondary C57BL/6 recipients, mouse anti-Ter119 microbeads (Miltenyi Biotec, catalog 130-049-901) or anti-PE microbeads (Miltenyi Biotec, catalog 130-048-801) following staining with human anti-CD46-PE primary antibody (Miltenyi Biotec, catalog 130-104-508) were used, respectively.

[0760] Animal studies. C57BL/6-based transgenic mice that are homozygous for the human CD46 genomic locus (CD46tg) and provide CD46 expression at a level and in a pattern similar to that in humans were described earlier (Kemper et al., Clin Exp Immunol. 2001; 124(2):180-189). CD46tg mice were provided by Roberto Cattaneo, Mayo Clinic (Rochester, Minn., USA). A thalassemic mouse model susceptible to infection by HDAd5/35++ vectors was obtained by breeding of female CD46tg mice with male Hbbth-3 mice (The Jackson Laboratory) and backcrossing of F1 with CD46tg mice, to generate CD46^{+/+}/Hbbth-3 mice. Six- to ten-week-old female CD46tg and CD46^{+/+}/Hbbth-3 females were used for the in vivo transduction/selection studies. Six- to ten-week-old female C57BL/6 mice were used as secondary recipients.

[0761] Mobilization and in vivo transduction of CD46tg mice. HSPCs were mobilized in mice by s.c. injections of human recombinant G-CSF (5 μg/mouse per day, 4 days) followed by an s.c. injection of AMD3100 (5 mg/kg) on day 5. In addition, animals received dexamethasone (10 mg/kg) i.p. 16 and 2 hours before virus injection. Thirty and 60 minutes after AMD3100, animals were injected i.v. with HDAd-γ-globin/mgmt plus HDAd-SB through the retro-orbital plexus with a dose of 4×10¹⁰ vp per injection (total 2 injections, 30 minutes apart). Four weeks later, mice were injected with O⁶-BG (15 mg/kg, i.p.) 2 times, 30 minutes apart. One hour after the second injection of O⁶-BG, mice were injected with BCNU (5 mg/kg, i.p.). The BCNU dose was increased in the second and third cycles to 7.5 and 10 mg/kg, respectively.

[0762] Mobilization and in vivo transduction of CD46^{+/+}/Hbbth-3 mice. In these studies, a 7-day mobilization approach with G-CSF 250 μg/kg i.p. (1-6 days) and plerixafor 5 mg/kg i.p. (formerly AMD3100; Mozobil, Genzyme Corp.) (days 5-7) was applied, as previously described in a thalassemic mouse model (Psatha et al., Hum Gene Ther Methods. 25(6):317-327, 2014). In vivo transduction was performed as above. Following treatment, combined immunosuppression was administered. At week 17, mice were subjected to 4 cycles of in vivo selection with O⁶BG (30 mg/kg, i.p.) and escalated BCNU doses (5, 7.5, 10, 10 mg/kg) with a 2-week interval between doses. Immunosuppression was resumed 2 weeks after the last O⁶-BG/BCNU dose.

[0763] Immunosuppression. Daily i.p. injection of mycophenolate mofetil (20 mg/kg/d), rapamycin (0.2 mg/kg/d), and methylprednisolone (20 mg/kg/d) was performed.

[0764] Secondary bone marrow transplantation. Recipients were female C57BL/6 mice, 6-8 weeks old, from The Jackson Laboratory. On the day of transplantation, recipient mice were irradiated with 10 Gy. Bone marrow cells from in vivo-transduced CD46tg mice were isolated aseptically, and lineage-depleted cells were isolated using magnetic cell sorting (MACS). Four hours after irradiation, cells were injected i.v. at 1×10⁶ cells per mouse. In the CD46^{+/+}/Hbbth-3 mouse studies, 2×10⁶ whole bone marrow cells from in vivo-transduced CD46^{+/+}/Hbbth-3 mice were transplanted into submyeloablated secondary C57BL/6 recipients conditioned with 100 mg/kg i.p. busulfan (Busilvex, Pierre Fabre) divided into 3 daily doses or lethal TBI (1,000 cGy). At week 20, secondary recipients were sacrificed, and CD46+ cells from blood, bone marrow, and spleen were either isolated by MACS, or mice were subjected to mobilization and in vivo transduction, as described above. All secondary recipients received immunosuppression starting at week 4.

[0765] Tissue analysis. Spleen and liver tissue sections of 2.5 μm thickness were fixed in 4% formaldehyde for at least 24 hours, dehydrated, and embedded in paraffin. Staining with H&E was used for histological evaluation of extramedullary hemopoiesis. Hemosiderin was detected in tissue sections by Perls' Prussian blue staining. Briefly, the tissue sections were treated with a mixture of equal volumes (2%) of potassium ferrocyanide and hydrochloric acid in distilled water and then counterstained with neutral red. The spleen size was assessed as the ratio of spleen weight (mg) to body weight (g).

[0766] Blood analysis and bone marrow cytospins. Blood samples were collected into EDTA-coated tubes, and analysis was performed on a HemaVet 950FS (Drew Scientific) or ProCyteDx (IDEXX) machine. Peripheral blood smears were prepared and stained with May-Grunwald/Giemsa for 5 and 15 minutes, respectively (Merck). Suspensions of bone marrow cells were centrifuged onto slides using a cytospin device and stained with May-Grunwald/Giemsa.

[0767] Statistics. Data are presented as means±SEM. For comparisons of multiple groups, 1-way and 2-way ANOVA with Bonferroni post-testing for multiple comparisons was used. Differences between groups for 1 grouping variable were determined by unpaired, 2-tailed Student's t test. For nonparametric analyses, the Kruskal-Wallis test was used. Statistical analysis was performed using GraphPad Prism version 6.01 (GraphPad Software Inc.). A P value less than 0.05 was considered significant; *P≤0.05, **P≤0.0002, ***P≤0.00003.

[0768] Animal study approval. All experiments were conducted with approval from the controlling Institutional Review Board and IACUC.

[0769] Results. In vivo HSPC transduction with subsequent in vivo selection in CD46tg mice results in stable γ-globin expression in the majority of peripheral RBCs. The therapeutic HDAd5/35++ vector contains the human γ-globin gene under the control of 5-kb “micro” β-globin LCR/β-promoter for efficient expression in erythrocytes as well as an MGMT^{P140K} expression cassette (FIG. 2A, HDAd-γ-globin/mgmt). CD46tg mice are homozygous for the human CD46 locus expressing the HDAd5/35++receptor CD46 in a pattern and at a level similar to that in humans and are therefore a model for in vivo HSPC transduction studies (Richter et al., Blood. 128(18):2206-2217, 2016, Kemper et al., Clin Exp Immunol. 124(2):180-189, 2001). The goal of these studies in “healthy” CD46tg mice was to analyze the level, kinetics, and distribution of human γ-globin on mouse cells and the safety of the approach. Animals were mobilized with G-CSF/AMD3100 and then intravenously injected with HDAd-γ-globin/mgmt and the SB100X-expressing HDAd-SB vector. Three cycles of O⁶BG/BCNU treatment were initiated 4 weeks after vector injection, and mice were followed until week 18 after injection of the vectors (FIG. 2B). First, human γ-globin expression in RBCs was analyzed (FIG. 2C). The levels before the start of in vivo selection (week 4 after transduction) were only marginally above background. The percentage of γ-globin⁺ cells started to increase after the second round of selection and reached levels above 80% after the third round. The percentage of γ-globin-expressing cells was 7- to 10-fold higher in erythroid Ter119⁺ cells versus nonerythroid Ter119-cells in peripheral blood and bone marrow (FIG. 2D). HPLC was used to measure the level of γ-globin protein in comparison with the adult mouse α- and β-globin chains (FIG. 2E and FIG. 3; supplemental material at https://doi.org/10.1172/JCI122836DS1). At week 18, these levels reached 10%-15% of adult mouse α-globin and β-major globin and 25% of mouse β-minor globin. This was confirmed on the mRNA level by quantitative reverse transcription PCR (RT-qPCR), where human γ-globin mRNA was 13% of mouse β-major mRNA (FIG. 2F). To further demonstrate that primitive, long-term repopulating HSCs were transduced, lineage-depleted (Lin−) bone marrow cells from in vivo-transduced/selected mice were transplanted into irradiated C57BL/6 mice. Engraftment levels analyzed in peripheral blood, bone marrow, and spleen were greater than 95% and stable over an observation period of 20 weeks (FIGS. 4A, 4B). Human γ-globin levels (compared with mouse α-globin) were similar in (“primary”) in vivo-transduced mice (analyzed at week 18 after transduction) and secondary recipients analyzed at weeks 14 and 20 after transplantation (FIG. 4C).

[0770] The in vivo HSPC transduction/selection approach does not change the SB100X-mediated random transgene integration pattern and does not alter hematopoiesis. It was previously shown that in vivo transduction with the hybrid transposon/SB100X HDAd5/35++system resulted in random transgene integration in HSPCs (Richter et al., Blood. 128(18):2206-2217, 2016). To evaluate the effect of O⁶BG/BCNU in in vivo selection, transgene integration in bone marrow Lin− cells was analyzed at the end of the study, i.e., at week 20 in secondary recipients. Linear amplification-mediated PCR (LAM-PCR) followed by deep sequencing showed a random distribution pattern of integration sites in the mouse genome (FIG. 5A). Data pooled from 5 mice demonstrated 2.23% integration into exons, 31.58% into introns, 65.17% into intergenic regions, and 1.04% into untranslated regions (FIG. 5B). The level of randomness of integration was 99% without preferential integration in any given window of the whole mouse genome (FIG. 5C). This indicates that in vivo selection and further expansion of cells in secondary recipients did not result in the emergence of dominant integration sites (FIG. 5D). qPCR was used to measure, on average, two γ-globin cDNA copies per bone marrow cell in a population containing both transduced and non-transduced cells. The integrated transgene copy number was then quantified on a single-cell level. To do this, bone marrow Lin− cells from week 18 mice were plated in methylcellulose, isolated individual progenitor colonies, and performed qPCR on genomic DNA. In transgene-positive colonies (n=113), 86.7% of colonies had 2 or 3 integrated copies (FIG. 5E and FIG. 6). Four copies were found in 6.2% of colonies, 8 copies in 1.78%. 0.88% of colonies had either 13, 10, 7, 6, or 5 integrated vector copies.

[0771] No alterations in blood cell counts were found at the end the study (week 18) (FIG. 7A). Analysis of RBC parameters did not show abnormalities (FIGS. 7A-7C). Composition of Lin+ fractions in the bone marrow was similar in mice before and after treatment (week 18) mice (FIG. 7D). The levels of Lin-Sca1+cKit+ (LSK) HSPCs (FIG. 7D, last lane) and progenitor colony-forming cells (FIG. 7E) were also comparable in both groups.

[0772] Generation of the CD46+/+/Hbbth-3 mouse model expressing human CD46 and resembling human thalassemia intermedia. HDAd5/35++ vectors require human CD46 for infection. In order to develop a thalassemic mouse model for in vivo HSPC transduction studies, CD46tg (CD46+/+) mice were bred with Hbbth-3 mice heterozygous for the mouse Hbb-β1 and -β2 gene deletion (Yang et al., Proc Natl Acad Sci USA. 92(25):11608-11612, 1995). (The homozygous state is lethal in utero or early postnatally.) Hbbth-3 mice represent a viable form of thalassemia, resembling human thalassemia intermedia. F1 hybrid mice were backcrossed with CD46+/+ mice to generate CD46+/+/Hbbth-3 mice (FIG. 8). These mice displayed a thalassemic phenotype. Compared with parental CD46tg mice, CD46+/+/Hbbth-3 mice had significantly decreased RBC numbers (7.1±0.1 vs. 8.63±0.29 M/μl); lower hemoglobin (9.7±0.18 vs. 13.9±0.63 g/dl), hematocrit (30.7%±0.46% vs. 41.7%±1.48%), mean corpuscular hemoglobin (13.9±0.14 vs. 16.1±0.23 g/dl), and mean corpuscular volume (43.03±0.22 vs. 48.35±0.9 fl); and increased RBC distribution width (42.9%±0.29% vs. 25.3%±0.79%); and showed overt reticulocytosis (42.4%±1.43% vs. 11.8%±3.7%) (FIG. 9A). The red cell morphology in blood smears was characterized by hypochromia, widely varying sizes and shapes (anisopoikilocytosis), and cell fragmentation, similarly to the morphology of the Hbbth-3 mouse blood smears and in sharp contrast to the normocytic red cell appearance of CD46tg mice (FIG. 9B). Likewise, histological analysis of liver and spleen from CD46^{+/+}/Hbbth-3 mice revealed foci of extramedullary hemopoiesis containing clusters of erythroid precursors or megakaryocytes (FIG. 9C, bottom left and bottom middle panels), while Perls' staining demonstrated marked parenchymal iron deposition (FIG. 9C, bottom right panel) as opposed to absent or limited extramedullary hemopoiesis and iron accumulation in tissue sections from parental CD46tg mice (FIG. 9C, top panels). These characteristics of CD46^{+/+}/Hbbth-3 mice recapitulate the human disease and support the validity of such a model for subsequent experiments. Notably, the thalassemic phenotype in the CD46^{+/+}/Hbbth-3 model was also characterized by quantitative differences in lineages other than the erythroid lineage, as indicated by the elevated numbers of total WBCs (FIG. 10).

[0773] HSPC in vivo transduction with HDAd-γ-globin/mgmt plus HDAd-SB followed by in vivo selection in CD46^{+/+}/Hbbth-3 mice results in high, stable, and long-term expression of γ-globin. It was determined whether the in vivo transduction approach could ameliorate the characteristic disease parameters of the CD46^{+/+}/Hbbth-3 thalassemia mouse model. A modified G-CSF/AMD3100 mobilization scheme that was previously validated in Hbbth-3 mice (Psatha et al., Hum Gene Ther Methods. 2014; 25(6):317-327) yielded high numbers of LSK cells in the peripheral blood 1 hour after the last plerixafor (AMD3100) injection (FIG. 11), i.e., at the time point when HDAd-γ-globin/mgmt and HDAd-SB were injected intravenously. Mice received immunosuppression to avoid responses against the human γ-globin and MGMT proteins (FIG. 12). Considering a report that after ex vivo lentivirus vector gene therapy, genetically corrected erythroblasts have a survival advantage and undergo in vivo selection in Hbbth-3 mice (Miccio et al., Proc Natl Acad Sci USA 105(30):10547-10552, 2008), it was initially planned to conduct the study without O⁶BG/BCNU treatment. Average γ-globin⁺ RBC percentages reached 31.19%±2.7% at week 8 after in vivo transduction of CD46^{+/+}/Hbbth-3 mice but declined to 13.14%±0.4% by week 16. At this time, mice were split into 2 groups. Half of the mice were used for blood and bone marrow analysis (group 1: without in vivo selection) and as donors for secondary recipients, while the study was continued with the other group involving O⁶BG/BCNU in vivo selection (group 2: with in vivo selection) (see FIG. 12). At week 16, group 1 showed γ-globin expression in 13% of peripheral RBCs (FIGS. 13A, 13B). This level of γ-globin marking resulted in a significant reduction in the percentage of peripheral blood reticulocytes (FIG. 13C, last lane). However, it did not suffice to improve other RBC parameters, including RBC morphology and extramedullary hemopoiesis (FIGS. 13C, 13D). The level of primary γ-globin marking was maintained over 20 weeks in secondary C57BL/6 recipients that were myelo-conditioned with busulfan before transplantation (FIGS. 13E, 13F). This indicates that long-term-repopulating HSPCs were transduced.

[0774] In group 2, 4 cycles of in vivo selection resulted in a 6-fold increase in the percentage γ-globin⁺ RBCs reaching an average of 76% at week 29 (FIG. 14A). γ-Globin expression was erythroid-specific as indicated by analysis of γ-globin expression in gated or immunomagnetically isolated Ter119+ erythroid cells by flow cytometry as compared with Ter119− cells (FIG. 14B, FIG. 14C). In agreement with other studies (Miccio et al., Proc Natl Acad Sci USA. 105(30):10547-10552, 2008, Zhao et al., Blood. 113(23):5747-5756, 2009), selection occurred at the level of (nucleated and proliferating erythroid) progenitors before they exit the bone marrow (or spleen) and lose their nucleus. This is reflected in an increase of γ-globin⁺ Ter119⁺ cells in the bone marrow and spleen that occurred predominantly after versus before in vivo selection (FIG. 14D). However, the overall increase of γ-globin⁺ marking in Ter119⁺ cells in peripheral blood (where enucleated RBCs predominate) (FIG. 14B) is probably due to the additive effect of the “natural” in vivo selection provided by the thalassemic background. The human γ-globin over mouse α-globin ratio in RBCs measured by HPLC increased from almost undetectable levels at week 14 to 10% at week 29 (FIGS. 14E and 15; see CD46^{+/+}/Hbbth-3 mouse at baseline (FIG. 15B), week 16 (FIG. 15C) and week 29 (FIG. 15D, and CD46tg control (FIG. 15A)). Similarly, the level of γ-globin mRNA in blood cells of treated mice increased, translating into 10% human γ-globin mRNA of mouse β-globin mRNA at week 29 (FIG. 14F). 1.5 γ-globin gene copies per cell were measured in treated CD46^{+/+}/Hbbth-3 mice at week 29 after in vivo transduction (FIG. 16).

[0775] Reversal of the thalassemic phenotype of CD46^{+/+}/Hbbth-3 mice after in vivo transduction/selection. Six weeks after the last dose of O⁶BG/BCNU treatment, CD46^{+/+}/Hbbth-3 mice were sacrificed, and hematopoietic tissues were harvested for analysis. Hematological parameters at week 29 after in vivo transduction were significantly improved over baseline (FIG. 17A) (RBCs: 8.53±0.16 vs. 7.1±0.13 M/μl, P=0.01; hemoglobin: 11.27±0.39 vs. 9.7±0.18 g/dl, P=0.05; hematocrit: 41.37%±0.81% vs. 30.7%±0.46%, P=0.00001; mean corpuscular volume: 48.63±0.36 vs. 43.5±0.38 fl, P=0.003; RBC distribution width: 39.5%±0.8% vs. 43%±0.3%, P=0.006; reticulocytes: 31.13%±3.17% vs. 42.4%±1.43%, P=0.05), and for specific red cell indices (hematocrit [HCT], RBCs, mean corpuscular volume), levels were indistinguishable from their control CD46tg counterparts, suggesting near to complete phenotypic correction. Reticulocyte staining of blood smears demonstrated an impressive 3-fold reduction of reticulocyte numbers in treated CD46^{+/+}/Hbbth-3 mice with the highest percentage of γ-globin⁺ RBCs (FIG. 17B). Indicative of the reversal of the thalassemic phenotype in peripheral blood smears of the treated CD46^{+/+}/Hbbth-3 mice, the hypochromic, highly fragmented and anisopoikilocytic baseline RBCs were replaced by near-normochromic, well-shaped RBCs less variant in size (FIG. 17C, top panels). In contrast to the blockade of erythroid lineage maturation in bone marrow of CD46^{+/+}/Hbbth-3 mice, represented by the prevalence of pro-erythroblasts and basophilic erythroblasts, in cytospins from control and treated CD46^{+/+}/Hbbth-3 mice, maturing erythroblasts predominated and were represented by polychromatic and orthochromatic erythroblasts (FIG. 17C, middle panels). Intense parenchymal hemosiderosis was observed in the untreated CD46^{+/+}/Hbbth-3 mice, whereas only limited iron accumulation in the CD46tg and the treated CD46^{+/+}/Hbbth-3 mice could be detected (FIG. 17C, bottom panels). Accordingly, spleen size, a measurable characteristic of compensatory hemopoiesis, was markedly reduced in treated animals (FIGS. 17D, 17E).

[0776] In order to determine whether the combined in vivo transduction/selection approach resulted in genetic modification of primitive HSCs, bone marrow cells from treated CD46^{+/+}/Hbbth-3 mice harvested at week 29 (after transduction) were transplanted into C57BL/6 secondary recipients after either sublethal busulfan treatment or lethal total-body irradiation (TBI) (FIGS. 18A, 18B). Although, as expected, the engraftment rates in mice that received TBI were higher than those in busulfan-treated animals, the levels of expression adjusted to the engraftment levels did not show significantly different frequencies of γ-globin⁺ RBCs. The fact that more than 75% of transplant-derived (CD46+) erythrocytes were γ-globin⁺ at week 20 after secondary transplantation and with a marking rate similar to that found in primary treated mice at week 29 (FIGS. 18C, 18D) under the competitive conditions generated by the submyeloablative busulfan conditioning in a normal recipient background (in which the HDAd-γ-globin/HDAd-SB-transduced CD46^{+/+}/Hbbth-3 HSPCs had no selective advantage) further supports the conclusion that the approach results in the genetic correction of long-term repopulating HSCs. Moreover, secondary, busulfan-conditioned C57BL/6 recipients at week 20 after transplant that were submitted to mobilization and in vivo transduction demonstrated a remarkable enrichment in γ-globin-expressing cells and a significant increase in expression/MFI (FIG. 18E).

[0777] Safety of in vivo HSPC transduction with HDAd-γ-globin/mgmt plus HDAd-SB followed by O⁶-BG/BCNU in vivo selection. In the mouse studies, the procedure was well tolerated. No overt hematological abnormalities were observed. At time of sacrifice, 6 weeks after the last O⁶-GB/BCNU dose, all hematological values were within normal ranges, although the total WBC counts were lower compared with levels before in vivo selection, suggesting a cytoreductive effect of drug treatment on WBCs—in particular, lymphocytes (FIGS. 19A, 19B). This effect was also reflected in the reduced frequency of CD3+, CD19+, and Gr-1+ cells in bone marrow as compared with their untreated or preselection counterparts (FIG. 19C). Notably, even at their nadir (week 25-27; 2-4 weeks after the last O⁶BG/BCNU injection), the WBCs and platelets never reached aplasia levels (i.e., neutrophils <1,000/μl, platelets <20,000/p1), and the WBCs started to recover by week 30 (7 weeks after the last O⁶BG/BCNU injection). This together with the observation that in the CD46tg model, WBCs and lymphocyte counts returned to pretreatment levels 10 weeks after the last O⁶BG/BCNU injection (FIG. 7A), suggests that the cytoreductive effect of the in vivo selection drugs is mild and transient. Importantly, the bone marrow cell composition in the percentage of LSK and Ter119⁺ cells, as well as the colony-forming potential of bone marrow cells, was not affected by the in vivo transduction/selection of HSPCs (FIGS. 19C, 19D).

[0778] Discussion Despite the unequivocal clinical progress in ex vivo HSPC gene therapy of hemoglobinopathies, the need for myeloablative conditioning in order to reach clinically relevant HSPC engraftment rates is a major limitation. Furthermore, the technical complexity allows the implementation of such treatment in only a small number of specialized and/or accredited centers. The in vivo HSPC gene therapy approach that has been developed does not require myeloablation and HSPC cell transplantation and therefore makes HSPC gene therapy for thalassemia safer and more accessible. The central idea of the approach is to mobilize HSPCs from the bone marrow and, while they circulate at high numbers in the periphery, transduce them with an intravenously injected HSPC-tropic HDAd5/35++gene transfer vector system. The novel features of the HDAd5/35++ vector system include (a) CD46-affinity-enhanced fibers that allow for efficient transduction of primitive HSCs while avoiding infection of nonhematopoietic tissues after intravenous injection, (b) an SB100X transposase-based integration system that functions independently of cellular factors and mediates random transgene integration without a preference for genes, and (c) an MGMT^{P140K} expression cassette mediating selective survival and expansion of progeny cells without affecting the pool of transduced primitive HSCs by short-term treatment with low-dose O⁶BG/BCNU (Wang et al., Mol Ther Methods. Clin Dev. 8:52-64, 2018). Additional features that distinguish HDAd5/35++ vectors from currently used SIN-lentiviral (SIN-LV) vectors include their large (30 kb) insert capacity, which, in this study, was used to incorporate a micro-LCR/β-promoter-driven γ-globin gene and an EF1A promoter-driven MGMT^{P140K} gene with a size of 11.8 kb. Furthermore, the production of HDAd5/35++ vectors does not require large-scale plasmid transfections and yields more than 3×10¹² infectious particles per liter spinner culture. Notably, the yields of SIN-LV vectors used in clinical trials for hemoglobinopathies are at least 2 orders of magnitude lower.

[0779] Efficacy of the in vivo approach. In contrast to HSPC gene therapy of other genetic diseases (i.e., X-linked SCID, Cavazzana-Calvo et al., Science. 288(5466):669-672, 2000; ADA-SCID, Gaspar et al., Sci Transl Med. 3(97):97ra80. 2011; or Wiskott-Aldrich syndrome, Aiuti et al., Science. 341(6148):1233151, 2013) where stable transduction of less than 1% of HSPCs provides a significant clinical benefit, phenotypic correction of hemoglobinopathies in patients requires at least 20% corrected erythroid precursors (Persons et al., Blood. 97(10):3275-3282, 2001, Andreani et al., Blood.; 87(8):3494-3499, 1996, Negre et al., Blood. 117(20):5321-5331, 2011). In murine models for hemoglobinopathies, γ-globin expression at 15% of the total α-globin mRNA was sufficient for therapy (Persons et al., Blood. 2001; 97(10):3275-3282, McColl et al., Blood Med. 7:263-274, 2016, Pestina et al., Mol Ther. 17(2):245-252, 2009). In this study, after in vivo transduction/selection, more than 60% of bone marrow erythroblasts expressed γ-globin in the in vivo transduced CD46tg and CD46^{+/+}/Hbbth-3 models (FIGS. 2C and 14A). This translated into 40%-97% circulating γ-globin-expressing RBCs (FIGS. 2D and 14B). Importantly also, in both animal models, sustained γ-globin marking in RBCs was demonstrated in secondary recipients, suggesting that primitive, long-term repopulating HSCs were initially transduced by the vector system.

[0780] The qPCR studies detected 2 to 3 integrated transgene copies per cell in the overwhelming majority of bone marrow cells. In agreement with earlier studies (Zhao et al., Blood. 113(23):5747-5756, 2009, Zielske et al., Mol Ther. 9(6):923-931, 2004), it was not found that in vivo selection selected for high-copy-number clones. Taking into account the genome-wide integration site analysis, 1,000 originally transduced HSCs were projected. Considering that mice have 10,000 to 20,000 HSCs (Abkowitz et al., Blood. 100(7):2665-2667, 2002; Chen et al., Blood. 107(9):3764-3771, 2006), this would mean that the vector system targeted 5%-10% of HSCs, which would be a solid basis for a polyclonal reconstitution of hematopoiesis after in vivo selection and for a long-term therapeutic effect.

[0781] In the thalassemia intermedia model, a near-complete phenotypic correction was achieved. Key hematological parameters (HCTs, RBCs, mean corpuscular volume) were indistinguishable from their counterparts in “healthy” (parental CD46tg) mice. The degree of correction of RBC indices and morphology correlated with the level of γ-globin-expressing cells in individual mice. Peripheral RBCs and erythroid bone marrow precursor cells resembled those of healthy mice in both morphology and the maturation process. Extramedullary hematopoiesis and parenchymal iron deposition regressed, and spleen size was significantly reduced. The thalassemic phenotype in the CD46+/+/Hbbth-3 model was also characterized by leukocytosis/lymphocytosis (FIG. 10). (Leukocytosis/lymphocytosis is also often present in splenectomized thalassemia/sickle cell disease patients or patients with functional, disease-associated asplenia; Brousse et al, Br J Haematol. 166(2):165-176, 2014). Interestingly, WBC counts in CD46++/Hbbth-3 mice returned to levels of “healthy” CD46tg mice at week 29 after in vivo transduction (FIG. 19A). This effect suggests that the reversal of the thalassemic phenotype by the approach extends beyond the erythroid compartment, resulting in normalization of WBCs, and most likely overall spleen function.

[0782] Notably, in contrast to the study in CD46tg mice, in the context of a thalassemic background and in the absence of O⁶BG/BCNU treatment, 13% of γ-globin⁺ RBCs were circulating in peripheral blood of CD46+/+/Hbbth-3 mice, and this level was maintained long-term in secondary recipients. This indicates that γ-globin gene expression conferred a survival advantage to thalassemic genetically modified erythroid precursors similar to what was reported with ex vivo lentivector HSPC gene therapy in a mouse model of thalassemia major (Micco et al, Proc Natl Acad Sci USA. 105(30):10547-10552, 2008). However, the phenotypic correction in the thalassemia mouse model required O⁶BG/BCNU treatment. This suggests that, if required because of low globin marking, the inducible in vivo selection system allows for salvaging of the therapeutic efficacy by an easy pharmacological intervention.

[0783] To increase the level of γ-globin in murine thalassemia models further, the following possibilities may be considered: (a) The ratio of HDAd-SB to HDAd-γ-globin/mgmt vectors could be changed from 1:1 to 1:3 to increase the number of integrated transgene copies per cell (Zhang et al, PLoS One. 8(10):e75344, 2013). (b) It is also planned to use a 26.1-kb version of β-globin LCR to drive γ-globin expression to minimize transgene integration position effects (Wang et al, J Virol. 79(17):10999-11013, 2005). (c) In addition to the SB100X-based γ-globin gene addition system, the HDAd5/35++ vector could accommodate a CRISPR/Cas9 to disrupt γ-globin suppressor regions and reactivate the endogenous γ-globin genes (Li et al., Blood. 131(26):2915-2928, 2018).

[0784] To evaluate the relationship of time from mobilization and expression, an HDAd-mgmt/GFP vector+an HDAd-SB vector were administered to hCD46tg mice after mobilization with G-CSF and AMD3100. Serum anti-HDAd antibodies were measured as shown in FIGS. 20A and 20E. GFP was measured 4 days or 4 weeks and 4 days after mobilization (FIGS. 20B (“B”) and 20C (“C”)). A second round of mobilization and HDAd injection (4 weeks after the first round; FIG. 20D). Results are shown in FIG. 20F. The second round of mobilization (FIG. 20D; “D”) did not result in transduction of peripheral blood cells because of the development of neutralizing serum antibodies against the virus. However, as the in vivo transduction studies in secondary transplant recipients indicate (FIG. 18E), if the development of anti-HDAd antibodies could be pharmaceutically blocked, a second treatment could increase both the percentage of γ-globin⁺ RBCs and the γ-globin expression level/MFI.

[0785] Safety of the in vivo HSPC transduction/selection approach. This approach abrogates the need for myeloablation/conditioning and its associated toxicity, while it effectively targets HSPCs in the unconditioned host by simple intravenous and subcutaneous substance/vector injections. Importantly, the procedure has been well tolerated in all animals involved in this study.

[0786] Concerning the HSPC mobilization based on G-CSF/AMD3100 (plerixafor), the approach has been clinically proven safe and efficacious and is routinely used for HSPC mobilization and collection by leukapheresis in all running trials for thalassemia major (Psatha et al., Curr Gene Ther. 17(5):364-378, 2017, Karponi et al., Blood. 126(5):616-619, 2015). As an alternative to the mobilization regimen used in this study, other approaches may involve the continuous blockade of CXCR4 by small synthetic molecules to achieve a more efficient mobilization of HSPCs (Karpova et al., Blood. 129(21):2939-2949, 2017).

[0787] The intravenous injection of HDAd5/35++ vectors does not result in transgene expression in tissues other than the mobilized HSPCs and PBMCs in CD46tg mice at day 3 after injection (Richter et al., Blood. 128(18):2206-2217, 2016). This was in agreement with early studies in baboons with intravenously injected first-generation CD46-targeting Ad5/35 and Ad5/11 vectors (Ni et al., Blood. 128(18):2206-2217, 2016). A potential explanation for this tropism is that CD46 receptor density and accessibility are not sufficiently high in nonhematopoietic tissues to allow for efficient viral transduction (Richter et al., Blood. 128(18):2206-2217, 2016; Ong et al., Exp Hematol. 34(6):713-720, 2006). Here, the number of integrated transgene copies per cell were measured in different tissues at week 18 after in vivo transduction/selection using a transposon vector (FIG. 21A). Efficiency relative to copy number is presented in FIGS. 21B and 21C. Transposon copies integrated per cell in various tissues are shown (FIG. 21D). The copy number in bone marrow, PBMCs, and spleen was 2.5. Integrated transgenes were also detected in the genomic DNA from liver, lung, and intestine. Previous studies with a GFP vector system have shown that the signals in these organs originate from infiltrating blood cells and/or residential macrophages (Richter et al., Blood. 2016; 128(18):2206-2217).

[0788] Intravenous injection of HDAd vectors (but also other viral vectors) is associated with the release of proinflammatory cytokines (Atasheva et al., Curr Opin Virol. 21:109-113, 2016, Grieg et al., Mol Ther Methods Clin Dev. 3:16079, 2016), which can, however, efficiently be blocked by pretreatment with glucocorticoids the day before virus injection (Seregin et al., Mol Ther. 17(4):685-696, 2009) or vector dose fractionation (Illingworth et al., Mol Ther Oncolytics. 5:62-74, 2017). Good safety profiles of intravenously injected oncolytic adenoviruses have been documented in dozens of clinical trials, including a trial with a CD46-targeting oncolytic adenovirus (Garcia-Carbonero et al., J Immunother Cancer. 5(1):71, 2017).

[0789] Regarding the safety of in vivo selection and the concern that O⁶BG/BCNU-stimulated proliferation may deplete the reservoir of long-term quiescent HSPCs, studies with large-animal models have provided evidence for long-term multilineage selection without HSPC exhaustion or emergence of dominant clones (Beard et al., J Clin Invest. 120(7):2345-2354, 2010, Neff et al., J Clin Invest. 112(10):1581-1588, 2003). In these models, the hematopoietic and the extramedullary toxicity profile was acceptable. In the present study and the previous mouse studies (Wang et al., Mol Ther Methods Clin Dev. 8:52-64, 2018, Li et al., Blood. 131(26):2915-2928, 2018), in vivo selection was well tolerated without myelosuppression. No changes in the frequency of bone marrow HSPCs upon O⁶BG/BCNU treatment were observed. A mild decrease in WBCs, specifically lymphocyte counts, was transient. Three to four cycles of low-dose treatment with O⁶BG, an inhibitor of DNA repair processes, and BCNU, an alkylating agent, resulting in survival of in vivo selected HSPCs could, theoretically, trigger mutations and tumorigenesis. Arguing against this risk are long-term follow-up studies in monkeys and dogs that received such treatment and did not suggest signs of carcinogenesis (Beard et al., J Clin Invest. 120(7):2345-2354, 2010, Radke et al., Sci Transl Med. 9(414):eaan1145, 2017, Beard et al., Blood. 113(21):5094-5103, 2009). In an attempt to assess this risk in HSPCs, an in vitro study was performed with CD34+ cells transduced with an MGMT^{P140K}-expressing HDAd vector and subjected to O⁶BG/BCNU treatment at a dose that killed 98% of cells that were not protected by MGMT^{P140K} expression (FIGS. 22A-22C). At day 14 after drug exposure, Illumina whole exome sequencing of CD34+ cells without treatment and cells that survived the treatment was performed, with the result shown in the following tables. Whole exome sequencing of CD34+ cells that survived drug treatment vs untreated CD34+ cells. Sample sequences were compared to a Homo sapiens reference genome (UCSC hg19).

### Sample #1: Untreated CD34+ Cells

| Total | Percent | Targeted | Read | Padded Target | Padded Read |
|---|---|---|---|---|---|
| Aligned reads | Aligned Reads | Aligned Reads | Enrichment | aligned Reads | Enrichment |
| 46,870,836 | 80.51% | 38,437,631 | 82.01% | 40,158,769 | 85.68% |
| Total | Percent | Targeted | Base | Padded Target | Padded Base |
| Aligned Bases | Aligned Bases | Aligned Bases | Enrichment | aligned Bases | Enrichment |
| 6,544,191,633 | 75.45% | 4,308,625,487 | 65.64% | 5,541,019,474 | 84.67% |

### Sample #2: Selected CD34+ Cells

| Total | Percent | Targeted | Read | Padded Target | Padded Read |
|---|---|---|---|---|---|
| Aligned reads | Aligned Reads | Aligned Reads | Enrichment | aligned Reads | Enrichment |
| 47,858,908 | 81.07% | 39,945,698 | 81.38% | 40,463,838 | 84.555 |
| Total | Percent | Targeted | Base | Padded Target | Padded Base |
| Aligned Bases | Aligned Bases | Aligned Bases | Enrichment | aligned Bases | Enrichment |
| 6,590,512,869 | 74.93% | 4,339,416,710 | 65.84% | 5,523,089,486 | 83.80% |

[0792] Using Sorting Intolerant from Tolerant (SIFT; available online at uswest.ensemble.org) as a filter that predicts whether an amino acid substitution affects protein function, 126 de novo mutations per 47,858,908 sequenced base pairs in the treated sample (2.63×10⁻⁶ mutations per base pair) were identified. Using ClinVar as a filter, six mutations with potential pathological effects were found. Table 11 summarizes on which chromosome unique mutations were found:

TABLE 13
Number of unique mutations

| | |
|---|---|
| Chromosome 1 | 793 |
| Chromosome 2 | 502 |
| Chromosome 3 | 369 |
| Chromosome 4 | 243 |
| Chromosome 5 | 253 |
| Chromosome 6 | 341 |
| Chromosome 7 | 383 |
| Chromosome 8 | 241 |
| Chromosome 9 | 312 |
| Chromosome 10 | 269 |
| Chromosome 11 | 536 |
| Chromosome 12 | 362 |
| Chromosome 13 | 94 |
| Chromosome 14 | 252 |
| Chromosome 15 | 271 |
| Chromosome 16 | 475 |
| Chromosome 17 | 527 |
| Chromosome 18 | 94 |
| Chromosome 19 | 755 |
| Chromosome 20 | 283 |
| Chromosome 21 | 92 |
| Chromosome 22 | 276 |
| Chromosome M | 0 |
| Chromosome X | 351 |
| Chromosome Y | 6 |
| Total | 8080 |

[0793] The finding that O⁶BG/BCNU treatment causes mutations is not unexpected; however, the consequences of the exome sequencing data are unclear. Loss-of-function variants are common in the human population. A recent analysis by the Exome Aggregation Consortium identified 3,230 genes with loss-of-function mutations, with 72% of these variants having no currently established human disease phenotype (Lek et al., Nature. 536(7616):285-291, 2016).

[0794] The HDAd-SB vector that carries SB100X transposase and Flpe recombinases gene does not integrate and is lost during cell division (Li et al., Mol Ther Methods Clin Dev. 9:142-152, 2018). In agreement with previously published data (Li et al., Mol Ther Methods Clin Dev. 9:142-152, 2018), neither integrated nor episomal HDAd-SB vector was detectable by qPCR at the end of the studies in bone marrow Lin− cells. SB100X transposase mediates random transgene integration without a preference for integration into or near genes (Richter et al., Blood. 128(18):2206-2217, 2016, Zhang et al., PLoS One. 8(10):e75344, 2013). This random pattern is maintained after in vivo selection without the emergence of dominant integration sites/clones. Theoretically, random integration is relatively safer than preferential integration into active genes, which occurs during lentivirus or AAV vector transduction (Deyle et al., Curr Opin Mol Ther. 11(4):442-447, 2009, Bartholomae et al., Mol Ther. 19(4):703-710, 2011, Schroder et al., Ce//. 110(4):521-529, 2002). Notably, in a SIN-LV-based clinical trial for β-thalassemia, integration into an intron of the HMGA2 proto-oncogene triggered a benign clonal dominance in one patient (Cavazzana-Calvo et al., Nature. 467(7313):318-322, 2010).

[0795] To reduce the risk of potential tumorigenicity from a combined effect of SB100X-mediated random transgene integration and treatment with mutagenic selection drugs, a vector system was designed to eliminate the first risk factor. It mediated targeted γ-globin integration into a chromosomal safe harbor site and resulted in stable γ-globin marking in more than 70% of RBCs in mice (Li et al., 21st Annual American Society of Gene and Cell Therapy Meeting. Abstract 972).

[0796] The safety of this approach may be first clearly documented in long-term studies in nonhuman primates. In this context it is notable that macaque and baboon bone marrow CD34+ cells are as efficiently transduced by Ad5/35 vectors as human CD34+ cells (Tuve et al., J Virol. 80(24):12109-12120, 2006), and direct in vivo transduction of mobilized CD34+ cells by an integrating HDAd5/35++vector expressing GFP in macaques was demonstrated (Harworth et al., 21st Annual American Society of Gene and Cell Therapy Meeting. Abstract 995).

[0797] Toward the clinical translation of the approach. Production of HDAd5/35++ vectors routinely yields 5×10¹² viral particles (vp) per liter spinner culture. cGMP-grade HDAd production for Flexion's FX201 vector is established. Protocols for the pharmacological control of innate immune reaction to intravenously injected virus are more developed for humans than for mice and are currently practiced in clinical trials with intravenously injected high-dose rAAV vectors. However, the majority of humans have neutralizing serum antibodies directed against Ad5 capsid proteins, which will block in vivo transduction with HDAd5/35 vectors, i.e., vectors that contain Ad5 capsid proteins and chimeric Ad35 fibers. An alternative described in this disclosure includes vectors derived from Ad35. Ad35 is one of the rarest of the 57 known human serotypes, with a seroprevalence of less than 7% and no cross-reactivity with Ad5 (Vogels et al., J Virol. 77(15):8263-8271, 2003, Abbink et al., J Virol. 81(9):4654-4663, 2007, Kostense et al., AIDS. 18(8):1213-1216, 2004, Flomenberg et al., J Infect Dis. 155(6):1127-1134, 1987, Barouch et al., Vaccine. 29(32):5203-5209, 2011). Ad35 is less immunogenic than Ad5 (Johnson et al., J Immunol. 188(12):6109-6118, 2012), which is, in part, due to attenuation of T cell activation by the Ad35 fiber knob (Adams et al., J Gen Virol. 93(pt 6):1339-1344, 2012. Adams et al., Proc Natl Acad Sci USA 108(18):7499-7504, 2011, Shoji et al., PLoS One. 7(1):e30302, 2012). After intravenous injection, there is only minimal transduction (only detectable by PCR) of tissues, including the liver, in human CD46-transgenic mice (Sakurai et al., Gene Ther. 13(14):1118-1126, 2006, Sakurai et al., Mol Ther. 16(4):726-733, 2008) and nonhuman primates (Sakurai et al., Mol Ther. 16(4):726-733, 2008). First-generation Ad35 vectors have been used clinically for vaccination purposes (Baden et al., Ann Intern Med. 164(5):313-322, 2016, Kazmin et al., Proc Natl Acad Sci USA 114(9):2425-2430, 2017). For upcoming studies in humans, vectors will be generated based on HDAd35++ for in vivo HSPC gene therapy.

[0798] In summary, this provides an alternative to traditional lentivirus vector ex vivo gene therapy for thalassemia, which may simplify the therapy and, theoretically, make it accessible to resource-poor regions where thalassemia major is endemic and HSPC transplantation not feasible.

### Example 2. In Vivo Hematopoietic Stem Cell Gene Therapy of Murine Thalassemia Using a 29 kb β-Globin Locus Control Region

[0799] Example 1 describes significant advances in the ability to drive γ-globin gene expression in in vivo modified HSPC. It also states that to increase the level of γ-globin expression further, a longer version (e.g., 26.1 kb) of the β-globin LCR might be used to drive γ-globin expression. This Example provides the results of that follow-up analysis.

[0800] As described herein, hematopoietic stem/progenitor cell (HSPC) mobilization followed by intravenous injection of integrating, helper-depending adenovirus HDAd5/35++ vectors resulted in efficient transduction of long-term repopulating cells and disease amelioration in mouse models after in vivo selection of transduced HSPCs. Acute innate toxicity associated with HDAd5/35++ injection was controlled by appropriate prophylaxis making this approach feasible for clinical translation. This technically can be used as a simple in vivo HSPC transduction approach for gene therapy of thalassemia major or Sickle Cell Disease. A cure of these diseases requires high expression levels of the therapeutic protein ( [symbol] - or β-globin), which is difficult to achieve with lentivirus vectors due to their genome size limitation not allowing larger regulatory elements to be accommodated. This example capitalizes on the 35 kb insert capacity of HDAd5/35++ vectors to demonstrate that transcriptional regulatory regions of the β-globin locus with a total length of 29 kb can efficiently be transferred into HSPCs. The in vivo HSPC transduction resulted in stable [symbol] -globin levels in erythroid cells that conferred a complete cure of murine thalassemia intermedia. Notably, this was achieved with a minimal in vivo HSPC selection regimen. This study demonstrates that HDAd5/35++ vectors that incorporate large regulatory regions can address challenges in gene therapy of diseases that require high-level transgene expression.

[0801] Introduction. For gene therapy of hemoglobinopathies such as thalassemia major and Sickle Cell Anemia to be successful, the transferred gene is preferably expressed in erythroid cells at high levels, without position effects of integration and transcriptional silencing. The β-globin locus control region (LCR) is thought to be beneficial in such use. For gene therapy applications, a β-globin LCR containing HSI to HS5 has been shown to confer high-level expression upon cis-linked genes in transgenic mice (Grosveld et al., Cell 51: 975-985, 1987). However, this version of the LCR is too large to be used in lentivirus vectors (insert capacity 8 kb) and, therefore truncated “mini” or “micro” LCR versions have been developed. For example, in ongoing clinical trials in thalassemia patients a lentivirus containing a 2.7 kb mini-LCR (covering HS2-HS4) and a 266 bp β-globin promoter is being used (Negre et al., Curr Gene Ther 15:64-81, 2015). In Example 1, a 5.9 kb β-globin LCR version was employed that contained HS1 to HS4 and the β-globin promoter for expression of γ-globin in CD46 transgenic mice or CD46/Hbb^{th3} thalassemic mice (Wang et al., J Clin Invest 129:598-615, 2019). With the in vivo HSPC transduction/selection approach, γ-globin marking was achieved in nearly 100% of peripheral blood erythrocytes, while the level of γ-globin expression was 10-15% of that of adult mouse α-globin with an average integrated vector copy number (VCN) of 2-3 copies per cell.

[0802] For a complete cure of β₀/β₀ thalassemia or Sickle Cell Anemia, it is generally thought that a therapeutic globin (either γ- or β-globin) expression level of 20% in erythroid cells is required (Fitzhugh et al., Blood 130:1946-1948, 2017). One way to reach this level is by increasing the VCN by improving HSPC transduction or increasing the vector dose. Such approaches, however, have historically been observed in other contexts to increase the risk of toxicity, at least in part due to random integration pattern of utilized vector systems. In this Example, stronger transcriptional elements, namely a longer LCR version, were utilized to increase γ-globin expression in RBCs after in vivo HSPC transduction of CD46-transgenic mice.

[0803] A novel in vivo HSPC transduction approach that does not require leukapheresis, myeloablation, and HSPC transplantation is provided (Richter et al., Blood, 128:2206-2217, 2016). The approach involves a new vector platform suitable for in vivo HSPC transduction, i.e. helper-dependent, capsid-modified adenovirus vectors (HDAd5/35++). Features of these vectors include CD46-affinity enhanced fibers that allow for efficient transduction of primitive HSCs while avoiding infection of non-hematopoietic tissues after i.v. injection and an insert capacity of up to 30 kb. Due to limited accessibility, HSPCs localized in the bone marrow cannot be transduced by intravenously injected vectors, including HDAd5/35++ vectors, even when the vector targets receptors that are present on bone marrow cells (Ni et al., Hum Gene Ther, 16: 664-677, 2005 and Ni et al., Cancer Gene Ther, 13:1072-1081, 2006). A combination of granulocyte-colony-stimulating factor (G-CSF) and the CXCR4 antagonists AMD3100 (MOZOBIL™, PLERIXA™) has been shown to efficiently mobilize primitive progenitor cells in animal models and in humans (Fruehauf et al., Cytotherapy, 11: 992-1001, 2009 and Yannaki et al., Hum Gene Ther, 24: 852-860, 2013). G-CSF/AMD3100 was used to mobilize HSPCs from the bone marrow into the peripheral blood stream followed by an intravenous injection of HDAd5/35++ vectors. This was shown previously in human CD46 transgenic mice (Richter et al., Blood, 128: 2206-2217, 2016; Li et al., Mol Ther Methods Clin Dev, 9: 390-401, 2018; Li et al., Blood, 131: 2915-2928. 2018; Wang et al., J Clin Invest, 129: 598-615. 2019; Wang et al., Blood Adv, 3: 2883-2894, 2019; and Wang et al., Mol Ther Methods Clin Dev, 8: 52-64, 2018), humanized mice (Richter et al., Blood, 128: 2206-2217, 2016) and rhesus macaques (Harworth et al., ASCGT 21th Annual meeting, 2018, DOI: 10.1016/j.ymthe.2018.05.001). HSPCs transduced in the periphery home back to the bone marrow where they persist long-term. Without a proliferative advantage, in vivo transduced HSPCs do not efficiently exit the bone marrow and contribute to downstream differentiation. Short-term treatment of animals with O⁶BG/BCNU provides a proliferation stimulus to mgmt^{P140K} gene-modified HSPCs and subsequent stable transgene expression in >80% of peripheral blood cells (Wang et al., Mol Ther Methods Clin Dev, 8: 52-64, 2018).

[0804] HD-Ad5/35++ genomes do not integrate into the host cell genome and are lost upon cell division. For gene therapy purposes and to trace in vivo transduced HSPCs long-term, HD-Ad5/35++ vectors were modified to allow for transgene integration. This was done by incorporating a hyperactive Sleeping Beauty transposase system (SB100) (Zhang et al., PLoS One, 8: e75344, 2013; Hausl et al., Mol Ther, 18: 1896-1906, 2010; and Yant et al., Nat Biotechnol, 20: 999-1005, 2002). The transposase, co-expressed in trans from a second vector, recognizes specific DNA sequences (inverted repeats; “IRs”) flanking the transgene cassette and triggers the integration into TA dinucleotides of the chromosomal DNA. Unlike retrovirus integration, SB100x-mediated integration does not depend on the transcriptional status of the targeted genes (Yant et al., Mol Cell Biol, 25: 2085-2094, 2005). Several studies have demonstrated SB100x-mediated transgene integration is random and has not been associated with the activation of proto-oncogenes (Richter et al., Blood, 128: 2206-2217, 2016; Wang et al., Mol Ther Methods Clin Dev, 8: 52-64, 2018; Zhang et al., PLoS One, 8: e75344, 2013; Hausl et al., Mol Ther, 18: 1896-1906, 2010; and Yant et al., Nat Biotechnol, 20: 999-1005, 2002). An advantage of the SB100x-based integration system is that it does not depend on an efficient homologous DNA repair machinery of the cell. The latter is critical in HSPCs, which show low activity of DNA repair and recombination enzymes (Beerman et al., Cell Stem Cell, 15: 37-50, 2014). It was demonstrated that in vivo HSC co-infection with a HDAd35++-transposon vector and a SB100x/Flpe expressing vector in CD46-transgenic mice (Richter et al., Blood, 128: 2206-2217, 2016; Wang et al., J Clin Invest, 129: 598-615. 2019; Li et al., Mol Ther, 27: 2195-2212, 2019; Li et al., Mol Ther Methods Clin Dev, 9: 142-152, 2018; and Wang et al., J Virol, 79: 10999-11013, 2005) and human CD34+ cells (Li et al., Mol Ther, 27: 2195-2212, 2019) resulted in random transgene integration of 2 transgene copies/cell without a preference for genes.

[0805] The human genome is organized in a 3-D structure with long-range interactions between regulatory regions (i.e. transcription factor binding sites) usually through loop forming. Most of these interactions occur in the context of topologically associating domains (TADs). TADs are considered functional units of chromosome organization in which enhancers interact with other regulatory regions to control transcription. TAD/LCR border insulation is thought to restrict the search space of enhancers and promoters and to prevent unwanted regulatory contacts to be formed. Boundaries at both sides of these domains are conserved between different mammalian cell types and even across species.

[0806] Currently used lentivirus and rAAV gene transfer vectors can accommodate only small enhancers/promoters, often resulting in suboptimal level and tissue specificity of transgene expression, transgene silencing, and unintentional interactions with regulatory regions surrounding the vector integration site. In the worst-case scenario, the latter can lead to the activation of proto-oncogenes.

[0807] To increase the safety and efficacy of gene therapy, TADs should be used for gene addition strategies. The median size of TAD is 880 kb. With further advancement of high-throughput chromosome conformation capture (3C) assay and its subsequent 4C, 5C and H-C protocols as well as fiber-Seq assays, the interrogation of regulatory genome will progress at a rapid speed and, for gene therapy purposes, could deliver TADs that contain only critical core elements. The β-globin Locus Control Region (LCR) fails under the definition of a TAD.

[0808] Capsid-modified HDAd5/35++ vectors have been used for in vivo HSPC gene therapy (Li & Lieber, FEBS Lett. 593(24):3623-48, 2019; Richter et al., Blood. 128(18):2206-17, 2016). The approach involves the mobilization of HSPCs from the bone marrow, and while they circulate at high numbers in the periphery, HDAd5/35++ vectors are injected intravenously. These vectors target CD46, a receptor that is expressed on primitive HSPCs (Richter et al., Blood. 128(18):2206-17, 2016). Transduced HSPCs return to the bone marrow where they persist long-term. Random integration is mediated by an activity-enhanced Sleeping Beauty transposase (SB100x) (Boehme et al., Mol Ther Nucleic Acids. 5(7):e337, 2016). Targeted integration can be achieved via homology dependent DNA repair (Li et al., Mol Ther. 27(12):2195-212, 2019). This approach resulted in an amelioration of murine thalassemia intermedia (Wang et al., J Clin Invest. 129(2):598-615, 2019), the correction of murine hemophilia (Wang et al., Blood Adv. 3(19):2883-94, 2019), and the reversion of spontaneous cancer (Li et al., Cancer Res. 80(3):549-560, 2019). First data in non-human primates show that the in vivo HSPC gene therapy approach is safe when combined with glucocorticoid, IL6- and IL1β-receptor antagonist pretreatment to suppress innate immune responses after intravenous HDAd5/35++injection (Li et al., 23rd Annual ASGCT meeting. 2020; abstract #546). The intravenous injection of HDAd5/35++ vectors did not result in transgene expression in tissues other than the mobilized HSPCs and PBMCs in CD46tg mice at day 3 after injection (Richter et al., Blood. 128(18):2206-17, 2016; Wang et al., J Clin Invest. 129(2):598-615, 2019). This was recently confirmed in non-human primates. A potential explanation for this tropism is that CD46 receptor density and accessibility is not sufficiently high in non-hematopoietic tissues to allow for efficient viral transduction (Richter et al., Blood. 128(18):2206-17, 2016; Ni et al., Hum Gene Ther. 16(6):664-77, 2005).

[0809] In a previous study with HDAd5/35++ vectors, a 4.3 kb HSI-HS4 mini-LCR (β-globin locus control region) was used in combination with a 0.66 kb β-globin promoter to drive human γ-globin expression after in vivo HSPC transduction (Wang et al, J Clin Invest. 129(2):598-615, 2019; Ong et al., Exp Hematol. 34(6):713-20, 2006). In Hbb^{th3}/CD46+/+thalassemic mice, stable (8+months) γ-globin marking was achieved in nearly 100% of peripheral blood erythrocytes and near complete phenotypic correction (Wang et al., J Clin Invest. 129(2):598-615, 2019). However, the level of γ-globin expression was only 10-15% of that of adult mouse α-globin with an average integrated vector copy number (VCN) of 2 copies per cell, thus rendering the clinical translation of the approach to thalassemia major or SCD particularly challenging. Here, the large capacity of HDAd5/35++ vectors was exploited by incorporating β-globin TAD core elements including a γ-globin expression cassette with a length of 29 kb to achieve complete phenotypic correction

[0810] In this context, another intention was to demonstrate that the SB100x system can mediate the efficient integration of a 32.4 kb transposon. From studies with plasmid-based SB systems it was thought that the SB integration activity negatively correlated with the length of the transposon (Li et al., Mol Ther Methods Clin Dev. 9:142-52, 2018; Karsi et al., Mar Biotechnol (NY). 3(3):241-5, 2001). Taking this into consideration, the first SB-based HDAd vectors developed by the Kay and Ehrhardt groups carried relatively small (4 kb-6 kb) transposons (Turchiano et al., PLoS One. 9(11):e112712, 2014; Yant et al., Nat Biotechnol. 20(10):999-1005, 2002).

[0811] Recently, using HDAd5/35++ vectors, efficient SB100x-mediated integration of 10.8 kb (Wang et al., Blood Adv. 3(19):2883-94, 2019) and 11.8 kb (Wang et al., J Clin Invest. 129(2):598-615, 2019; Ong et al., Exp Hematol. 34(6):713-20, 2006) transposons in HSPC was demonstrated after ex vivo or in vivo HSPC transduction. This example provides proof that the HDAd5/35++-based SB100x vector system can integrate a 32.4 kb transposon.

[0812] Overall, these in vivo studies in normal and thalassemic mice as well as in vitro studies with human CD34+ cells indicate that the described long-LCR containing HDAd5/35++ vector can be an efficient therapeutic tool for the treatment of hemoglobinopathies.

[0813] Materials and Methods.

[0814] Component Positions: HS5→HS1 (21.5 kb): Chr11, 5292319→5270789; p-promoter: chr11, 5228631→5227023; and 3′HS1: Chr11, 5206867→5203839.

[0815] HDAd vectors: The generation of HDAd-SB and HDAd-short-LCR vector has been described previously (Richter et al., Blood 128: 2206-2217, 2016; Ong et al., Exp Hematol 34(6):713-20, 2006). For the generation of the HDAd-long-LCR vector, corresponding shuttle plasmids were based on the cosmid vector pWE15 (Stratagene, La Jolla, Calif.). pWE.Ad5-SB-mgmt contains the Ad5 5′ITR (nucleotides 1 through 436) and 3′ITR (nucleotides 35741 through 35938), the human EF1α promoter-mgmt^{P140K}-SV40 pA-cHS4 cassette derived from pBS-pLCR-γ-globin-mgmt (Wang et al., J Clin Invest 129: 598-615, 2019), SB100x-specific IR/DR sites and FRT sites. The GFP-BGHpA fragment in the pAd.LCR-β-GFP (containing a 21.5-kb human β-globin LCR (Hudecek et al., Crit Rev Biochem Mol Biol 52(4):355-380, 2017) was replaced by the human γ-globin gene and its 3′UTR region (Chr 11:5,247,139→5,249,804) (pAd-long-LCR-β-γ-globin). The plasmid pAd-long-LCR-β-γ-globin contains a 21.5-kb human β-globin LCR and 3.0-kb human β-globin 3′HS1. The 28.9-kb fragment containing LCR-β-γ-globin-3′HS1 was inserted downstream of the cassette of EF1α-mgmt-SV40 pA-cHS4 into pWE.Ad5-SB-mgmt (pWE.Ad5-SB-long-LCR-γ-globin/mgmt). The complete long-LCR-γ-globin/mgmt cassette was flanked by SB100x-specific IR/DR sites and FRT sites. The resulting plasmids were packaged into phages using Gigapack III Plus Packaging Extract (Stratagene, La Jolla, Calif.) and propagated. To generate the HD-Ad-long-LCR-γ-globin/mgmt virus, the viral genomes were released by I-Ceul digestion from the plasmid for rescue in 116 cells. There are two known variants of the HBG1 gene in the human population with a single amino acid variation (76-Isoleucine or 76-Threonine). The 76-Ile HBG1 variant was used which has a range in frequency from 13% in Europeans to 73% in East Asians.

[0816] To generate HDAd viruses, the viral genomes were released by Fsel digestion from the plasmid for rescue in 116 cells (Palmer et al., Mol Ther 8: 846-852, 2003) with Ad5/35++-Acr helper virus. This helper virus is a derivative of AdNG163-5/35++, an Ad5/35++ helper vector containing chimeric fibers composed of the Ad5 fiber tail, the Ad35 fiber shaft, and the affinity-enhanced Ad35++fiber knob (Richter et al., Blood 128: 2206-2217, 2016). A human codon-optimized AcrIIA4-T2A-AcrIIA2 sequence that was recently shown to inhibit SpCas9 activity was synthesized (Yang et al., Proc Natl Acad Sci USA. 92(25):11608-12, 1995) and cloned into a shuttle plasmid pBS-CMV-pA (pBS-CMV-Acr-pA). Subsequently, the 2.0-kb CMV-Acr-pA cassette was amplified from pBS-CMV-Acr-pA and inserted into the Swal sites of pNG163-2-5/35++ (Richter et al., Blood 128: 2206-2217, 2016) by In-Fusion HD cloning kit (Takara). The viral genome was then released by PacI digestion and the Ad5/35++-Acr helper virus was rescued and propagated in 293 cells (HEK293). The generation of HDAd-SB has been described previously (Richter et al., Blood 128: 2206-2217, 2016). Helper virus contamination levels were below 0.05%. All preparations were free of bacterial endotoxin.

[0817] CD34+ cell culture: CD34+ cells from G-CSF-mobilized adult donors were recovered from frozen stocks and incubated overnight in Iscove's modified Dulbecco's medium (IMDM) supplemented with 10% heat-inactivated FCS, 1% BSA 0.1 mmol/l 2-mercaptoethanol, 4 mmol/l glutamine and penicillin/streptomycin, Flt3 ligand (Flt3L, 25 ng/mi), interleukin 3 (10 ng/mi), thrombopoietin (TPO) (2 ng/mi), and stem cell factor (SCF) (25 ng/mi). Flow cytometry demonstrated that >98% of cells were CD34+. Cytokines and growth factors were from Peprotech (Rocky Hill, N.J.). CD34+ cells were transduced with virus in low attachment 12 well plates.

[0818] Erythroid in vitro differentiation: Differentiation of human HSPCs into erythroid cells were carried out based on the protocol described in Douay et al. (Methods Mol Bio/482: 127-140, 2009). In brief, in step 1, cells at a density of 10⁴ cells/ml were incubated for 7 days in IMDM supplemented with 5% human plasma, 2 IU/ml heparin, 10 μg/ml insulin, 330 μg/ml transferrin, 1 μM hydrocortisone, 100 ng/ml SCF, 5 ng/ml IL-3, 3 U/ml erythropoietin (Epo), glutamine, and Pen-Strep. In step 2, cells at a density of 1×10⁵ cells/ml were incubated for 3 days in IMDM supplemented with 5% human plasma, 2 IU/ml heparin, 10 μg/ml insulin, 330 μg/ml transferrin, 100 ng/ml SCF, 3 U/ml Epo, glutamine, and Pen/Strep. In step 3, cells at a density of 1×10⁶ cells/ml cells were incubated for 12 days in IMDM supplemented with 5% human plasma, 2 IU/ml heparin, 10 μg/ml insulin, 330 μg/mi transferrin, 3 U/ml Epo, glutamine, and Pen/Strep.

[0819] In vitro selection of transduced CD34+ cells: Transduced CD34+ cells were selected with O⁶BG/BCNU on day 5 in step 1 of the in vitro differentiation protocol. Briefly, CD34+ cells were incubated with 50 μM O⁶13 G for one hour and then incubated with 35 μM BCNU for another two hours, cells were then washed twice and resuspended in fresh step 1 medium.

[0820] Lin⁻ cell culture: Lineage negative cells were isolated form total mouse bone marrow cells by MACS using the Lineage Cell Depletion kit from Miltenyi Biotech (Bergisch Gladbach, Germany). Lin⁻ cells were cultured in IMDM supplemented with 10% FCS, 10% BSA, Pen-Strep, glutamine, 10 ng/ml human TPO, 20 ng/ml mouse SCF and 20 ng/ml human Fit-3L.

[0821] Globin HPLC: Individual globin chain levels were quantified on a Shimadzu Prominence instrument with an SPD-10AV diode array detector and an LC-10AT binary pump (Shimadzu, Kyoto, Japan). A 40%-60% gradient mixture of 0.1% trifluoroacetic acid in water/acetonitrile was applied at a rate of 1 mL/min using a Vydac C4 reversed-phase column (Hichrom, UK).

[0822] Flow cytometry: Cells were resuspended at 1×10⁶ cells/100 μL in PBS supplemented with 1% FCS and incubated with FcR blocking reagent (Miltenyi Biotech, Auburn Calif.) for ten minutes on ice. Next the staining antibody solution was added in 100 μL per 10⁶ cells and incubated on ice for 30 minutes in the dark. After incubation, cells were washed once in FACS buffer (PBS, 1% FBS). The staining step was repeated with a secondary staining solution. After the wash, cells were resuspended in FACS buffer and analyzed using a LSRII flow cytometer (BD Biosciences, San Jose, Calif.). Debris was excluded using a forward scatter-area and sideward scatter-area gate. Single cells were then gated using a forward scatter-height and forward scatter-width gate. Flow cytometry data were then analyzed using FlowJo (version 10.0.8, FlowJo, LLC). For flow analysis of LSK cells, cells were stained with biotin-conjugated lineage detection cocktail (cat #: 130-092-613; Miltenyi Biotec, San Diego, Calif.) and antibodies against c-Kit (cat #:12-1171-83) and Sca-1 (cat #: 25-5981-82) as well as APC-conjugated streptavidin. Other antibodies from eBioscience (San Diego, Calif.) included anti-mouse LY-6A/E (Sca-1)-PE-Cyanine7 (clone D7), anti-mouse CD117 (c-Kit)-PE (clone 2B8), anti-mouse CD3-APC (clone 17A2; cat #:17-0032-82), anti-mouse CD19-PE-Cyanine7 (clone eBio1D3; cat #: 25-0193-82), and anti-mouse Ly-66 (Gr-1)-PE, (clone RB6-8C5; cat #: 12-5931-82). Anti-mouse Ter-119-APC (clone: Ter-119; cat #: 116211) was from Biolegend (San Diego, Calif.).

[0823] Intracellular flow cytometry detecting human γ-globin expression: The FIX & PERM™ (Nordic Immunological Laboratories, Susteren, Netherlands) cell permeabilization kit (Thermo Fisher Scientific, Waltham, Mass.) was used and the manufacture's protocol was followed. Briefly, 1×10⁶ cells were resuspended in 100 μl FACS buffer (PBS supplemented with 1% FCS), 100 μl of reagent A (fixation medium) was added and incubated for 2-3 minutes at room temperature, 1 ml pre-cooled absolute methanol was then added, mixed and incubated on ice in the dark for 10 minutes. The samples were then washed with FACS buffer and resuspended in 100 μl reagent B (permeabilization medium) and 0.3 μg hemoglobin γ antibody (Santa Cruz Biotechnology, Dallas, Tex., cat #sc-21756 PE), incubated for 30 minutes at room temperature. After the wash, cells were resuspended in FACS buffer and analyzed. Flow cytometry gating strategies are shown in FIG. 46.

[0824] Real-time reverse transcription PCR: Total RNA was extracted from 50-100 μl blood by using TRIzol™ reagent (Thermo Fisher Scientific) following the manufacture's phenol-chloroform extraction method. Quantitect reverse transcription kit (Qiagen) and power SYBR™ green PCR master mix (Thermo Fisher Scientific) were used. Real time quantitative PCR was performed on a StepOnePlus real-time PCR system (AB Applied Biosystems). The following primer pairs were used: mouse RPL10 (house-keeping) forward (SEQ ID NO: 189), and reverse (SEQ ID NO: 190); human γ-globin forward (SEQ ID NO: 191), and reverse (SEQ ID NO: 192); mouse β-major globin forward (SEQ ID NO: 193), and reverse (SEQ ID NO: 194), mouse a globin forward (SEQ ID NO: 212), and reverse (SEQ ID NO: 213).

[0825] Measurement of vector copy number: Total DNA from bone marrow cells was extracted using the Quick-DNA miniprep kit (Zymo Research). Viral DNA extracted from HDAd-short LCR-γ-globin/mgmt virus was serially diluted and used for a standard curve. qPCR was conducted in triplicate using the power SYBR Green PCR master mix on a StepOnePlus real-time PCR system (Applied Biosystems). 9.6 ng DNA (9600 μg/6 μg/cell=1600 cells) was used fora 10 μL reaction. The following primer pairs were used: human γ-globin forward (SEQ ID NO: 195), and reverse (SEQ ID NO: 196).

[0826] Integration site analysis. For a description of the procedure, see FIG. 27. The randomized data for FIG. 28D was created using a Poisson Regression Insertion Model (PRIM) to calculate the expected insertion rate for non-overlapping 20 kilobase windows along the length of each chromosome in the mouse reference genome (mm9). The PRIM algorithm generated a statistical model based on the number of TA dinucleotides within each window, the chromosome in which the window resides, and the total number of unique insertions. For each window, the expected number of insertions was calculated and compared to the observed number of insertions to produce a p-value. Bonferroni-correction was then applied to identify windows that showed enrichment for detection of inserted transposons. Random sequences from the reference genome containing TA were then generated, mapped using Bowtie2 and plotted against the real integration data. Calculations and plots were made using ggplot2 in R. figures were drawn using HOMER and ChlPseeker.

[0827] Integration site analysis (inverse PCR). Junctions in total bone marrow cells were analyzed by inverse PCR as described elsewhere with modifications (Hudecek et al., Crit Rev Biochem Mol Biol 52(4):355-80, 2017). Briefly, genomic DNA from bone marrow cells was isolated by Quick-DNA miniprep kit (Zymo Research) following the manufacturer's instructions. 5-10 μg of DNA was digested with SacI and re-ligated under conditions that promote intramolecular reaction. The ligation mixture was purified with phenol/chloroform extraction and ethanol precipitation and then used for nested PCR (30 cycles each) using KOD Hot Start DNA polymerase. The following primers were used: EF1α p1 forward (SEQ ID NO: 197) and reverse (SEQ ID NO: 198); EF1α p2 forward (SEQ ID NO: 199) and reverse (SEQ ID NO: 200); 3′HS1 p1 forward (SEQ ID NO: 201) and reverse (SEQ ID NO: 202); and 3′HS1 p2 forward (SEQ ID NO: 203) and reverse (SEQ ID NO: 204). In SEQ ID NOs: 197-204, the underlined bases are used for downstream cloning. PCR amplicons were gel purified, cloned, sequenced and aligned to identify the integration sites.

[0828] RNA-seq analysis was performed by Omega Bioservices (Norcross, Ga.). Data was analyzed by Rosalind (available online at rosalind.onramp.bio/), with a HyperScale architecture developed by OnRamp Biolnformatics, Inc. (San Diego, Calif.). Reads were trimmed using cutadapt. Quality scores were assessed using FastQC. Individual sample reads were quantified using HTseq4 and normalized via Relative Log Expression (RLE) using DESeq2 R library. DEseq2 was also used to calculate fold changes and p-values and perform optional covariate correction. Clustering of genes for the final heatmap of differentially expressed genes was done using the PAM (Partitioning Around Medoids) method using the fpc R library. Several database sources were referenced for enrichment analysis, including Interpro9, NCBI10, MSigDB11,12, REACTOMEI3, WikiPathways. Enrichment was calculated relative to a set of background genes relevant for the experiment.

[0829] The volcano plot was generated with a custom Python script that plots log-scale fold change versus p-values.

[0830] Animals:

[0831] Study approval: All experiments involving animals were conducted in accordance with the institutional guidelines set forth by the University of Washington. The University of Washington is an Association for the Assessment and Accreditation of Laboratory Animal Care International (AALAC)-accredited research institution and all live animal work conducted at this university is in accordance with the Office of Laboratory Animal Welfare (OLAVV) Public Health Assurance (PHS) policy, USDA Animal Welfare Act and Regulations, the Guide for the Care and Use of Laboratory Animals and the controlling Institutional Animal Care and Use Committee (IACUC) policies. The studies were approved by the University of Washington IACUC (Protocol No. 3108-01).

[0832] Ex vivo and in vivo HSPC transduction studies were performed with a C57Bl/6-based transgenic mouse model (hCD46tg) that contained the complete human CD46 locus. These mice express hCD46 in a pattern and ata level similar to humans (Wang et al., Mol Ther Methods Clin Dev. 8:52-64, 2018).

[0833] Breeding and screening of Hbb^{th3}/CD46+/+ mice: After three rounds of backcrossing, Hbbth³ mice homozygosity for CD46 was confirmed by PCR on gDNA (using CD46F-5′ (SEQ ID NO: 205) and CD46R primers (SEQ ID NO: 206) as well as by flow cytometry that allowed measuring CD46 MFI. The thalassemic phenotype of Hbb^{th3}/CD46+/+ mice was assessed by peripheral blood smears, after Giemsa/May-Grunwald staining, as described below.

[0834] Bone marrow Lin⁻ cell transplantation: Recipients were female C57BL/6 mice, 6-8 weeks old. On the day of transplantation, recipient mice were irradiated with 1000 Rad. Four hours after irradiation 1×10⁶ Lin⁻ cells were injected intravenously through the tail vein. This protocol was used for transplantation of ex vivo transduction Lin⁻ cells and for transplantation into secondary recipients.

[0835] HSPC mobilization and in vivo transduction: This procedure was described previously in Richter, et al., (2016) Blood 128: 2206-2217. HSPCs were mobilized in mice by s.c. injections of human recombinant G-CSF (5 μg/mouse/day, 4 days) (Amgen Thousand Oaks, Calif.) followed by an s.c. injection of AMD3100 (5 mg/kg) (Sigma-Aldrich) on day 5. In addition, animals received Dexamethasone (10 mg/kg) i.p. 16 h and 2 h before virus injection. Thirty and 60 minutes after AMD3100, animals were intravenously injected with HDAd vectors through the retro-orbital plexus with a dose of 4×10¹⁰ vp for each virus per injection. Four weeks later, in vivo selection of O⁶BG/BCNU was initiated.

[0836] Secondary bone marrow transplantation: Recipients were female C57BL/6 mice, 6-8 weeks old from the Jackson Laboratory. On the day of transplantation, recipient mice were irradiated with 1000 Rad. Bone marrow cells from in vivo transduced CD46tg mice were isolated aseptically and lineage-depleted cells were isolated using MACS. Four hours after irradiation cells were injected intravenously at 1×10⁶ cells per mouse. At week 20, secondary recipients were either sacrificed and CD46+ cells from blood, bone marrow and spleen were isolated by MACS or subjected to mobilization and in vivo transduction, as described above. All secondary recipients received immunosuppression starting at week 4.

[0837] Hematological analyses: Blood samples were collected into EDTA-coated tubes, and analysis was performed on a HemaVet 950FS (Drew Scientific).

[0838] Tissue analysis: Spleen and liver tissue sections of 2.5 μm thickness were fixed in 4% formaldehyde for at least 24 hours, dehydrated and embedded in paraffin. Staining with hematoxylin-eosin was used for histological evaluation of extramedullary hemopoiesis. Hemosiderin was detected in tissue sections by Perl's Prussian blue staining. Briefly, the tissue sections were treated with a mixture of equal volumes (2%) of potassium ferrocyanide and hydrochloric acid in distilled water and then counterstained with neutral red. To quantitate extracellular hemopoiesis and hemosiderosis, 10 random areas in 5 different tissue sections from at least 3 animals were evaluated by investigators that were blinded for the mouse groups. The spleen size was assessed as the ratio of spleen weight (mg)/body weight (g).

[0839] Blood analysis and bone marrow cytospins: Blood samples were collected into EDTA-coated tubes and analysis was performed on a HemaVet 950FS (Drew Scientific, Waterbury, Conn.). Peripheral blood smears and bone marrow cell cytospins were stained with Giemsa/May-Grunwald/Giemsa (Merck, Darmstadt, Germany) for 5 and 15 minutes, respectively. Reticulocytes were stained with Brilliant cresyl blue. The investigators who counted the reticulocytes on blood smears have been blinded to the sample group allocation. Only animal numbers appeared on the slides (5 slides per animal, 5 random 1 cm² sections).

[0840] Statistical analyses: Data are presented as means±standard error of the mean (SEM). For comparisons of multiple groups, one-way and two-way analysis of variance (ANOVA) with Bonferroni post-testing for multiple comparisons was employed. Differences between groups for one grouping variable were determined by the unpaired, two-tailed Student's t-test. For non-parametric analyses the Kruskal-Wallis test was used. Statistical analysis was performed using GraphPad Prism version 6.01 (GraphPad Software Inc., La Jolla, Calif.). *p≤0.05, **p≤00.0001. A P value less than 0.05 was considered significant.

[0841] Results.

[0842] As a model for the in vivo transduction studies with intravenously injected HDAd5/35++vectors, transgenic mice were used that contain the complete human CD46 locus and therefore express hCD46 in a pattern and at a level similar to humans (hCD46tg mice) (Kemper, et al., (2001) Clin Exp Immunol 124: 180-189).

[0843] HDAd5/35++ vector containing a long β-globin LCR. In the studies described in Example 1, a HDAd5/35++ vector (FIG. 23, “HDAd-short-LCR”) (Wang et al., J Clin Invest 129: 598-615, 2019) was used expressing γ-globin under the control of a 4.3 kb mini LCR (encompassing the core elements of HS1 to HS4 (Lisowski et al., Blood 110: 4175-4178, 2007)) linked to a 1.6 kb β-globin promoter (Wang et al., J Clin Invest 129: 598-615, 2019; Li, et al., ( ) Mol Ther Methods Clin Dev 9: 142-152, 2018). In the present Example, an HDAd5/35++ vector was constructed that contained the following elements to maximize γ-globin gene expression: i) a 21.5 kb LCR including the full-length HS5 to HS1 regions, ii) a 1.6 kb β-globin promoter, iii) a β-globin 3′UTR to stabilize γ-globin mRNA, and iv) a 3′ HS1 region. The vector was named HDAd-long-LCR (FIG. 23, “HDAd-long-LCR”). To mediate integration, the LCR-vectors are used in combination with a SB100x/Flpe expressing HDAd vectors (FIG. 23, “HDAd-SB”). The transposon vectors (HDAd-short-LCR and HDAd-long-LCR) contain inverted/direct repeat (IR/DRs) motifs, which are recognized by the SB100x transposase and frt sites that allow for circularization of the transgene cassette in the presence of Flpe recombinase. Both HDAd-short-LCR and HDAd-long-LCR also carried the gene for a mutant O⁶-methylguanine-DNA methyltransferase (mgmt^{P140K}) under control of the ubiquitously active EF1α promoter to allow for selection of stably transduced cells by low-dose O⁶BG/BCNU treatment (Hausl et al., B. Mol Ther 18(11):1896-906, 2010; Neff et al., J Clin Invest 112(10):1581-8, 2003).

[0844] Ex vivo HSPC transduction/transplantation study. While in humans, CD46 is expressed on all nucleated cells, the corresponding orthologue in mice is present only in the testes. As a model for in vivo transduction studies with intravenously injected HDAd5/35++ vectors, transgenic mice that contained the complete human CD46 locus were used and therefore expressed hCD46 in a pattern and at a level similar to humans (CD46tg mice) (Wang et al., Mol Ther Methods Clin Dev 8:52-64, 2018). Because, a priori, it was not known whether SB100x can mediate the integration of the 32.4 kb transposon, ex vivo HSPC transduction studies were performed, in a setting where the HSPC transduction efficacy could be controlled. CD46tg mouse bone marrow lineage-negative (Lin⁻) cells, a cell fraction enriched for HSPCs were transduced ex vivo with HDAd-long-LCR+HDAd-SB (FIG. 24A). Ex vivo transduced cells were then transplanted into lethally irradiated C57Bl/6 mice. Engraftment rates at week 4 were >95% based on CD46-positive PBMCs. One month after transplantation, mice were subjected to four rounds of O⁶BG/BCNU treatment to selectively expand progenitors with integrated γ-globin/mgmt transgenes (FIG. 24A). With each round of in vivo selection, the percentage of γ-globin-positive peripheral red blood cells (RBCs) increased, reaching >95%, by the end of the study (FIG. 24B). At week 20, animals were sacrificed and bone marrow mononuclear cells (MNCs) were analyzed. The average VCN measured by qPCR was 2.8 copies per cell. γ-globin expression was detected by flow cytometry in 85.46(+/−5.9)% of erythroid Ter119⁺ cells and in 14.54(+/−2.3)% non-erythroid (Ter119⁻) bone marrow MNCs (FIG. 24C).

[0845] To demonstrate that γ-globin expression originated from SB100x integrated transgenes, an inverse PCR (iPCR) analysis was performed on genomic DNA from bone marrow mononuclear cells (MNCs) harvested at week 20 after transplantation. The iPCR protocol involves the digestion of genomic DNA with SacI, a re-ligation/circularization step, nested PCR and sequencing of vector/chromosome junctions (FIG. 24D). (FIG. 24E) shows three representative PCR products and the localization of the integration sites on chromosomes 4, 15, and X. Sequencing of the products demonstrated vector/chromosome junctions typical for SB100x mediated integration including the TA di-nucleotides at the vector IR/DR-chromosome junctions (FIG. 24F). In summary, in the ex vivo HSPC transduction study, the long globin LCR conferred high-level γ-globin expression originating from SB100x integrated transposons.

[0846] In vivo HSPC transduction in CD46b transgenic mice with HDAd5/35++ vectors containing the short vs long LCRs. A side-by-side comparison of HDAd-long-LCR and the previously used vector in Example 1 (Wang et al., J Clin Invest 129: 598-615, 2019; Li et al., Mol Ther Methods Clin Dev 9: 142-152, 2018) containing the miniLCR (herein referred to as “HDAd-short-LCR”) was performed (FIG. 23). CD46-transgenic mice were mobilized with G-CSF/AMD3100 and intravenously injected with the vectors, and five weeks later, subjected to in vivo selection (FIG. 25A). The percentage of γ-globin-positive red blood cells (RBCs) increased with each round of in vivo selection reaching >95% for both vectors at week 20 (FIG. 25B). HPLC performed on RBC lysates from week 20 samples did not show significant differences in percentages of γ-globin/adult mouse α-globin between the vectors (FIG. 25C). This was also reflected at the mRNA level (FIG. 25D).

[0847] The vector copy number in bone marrow mononuclear cells (MNCs) measured at week 20 by qPCR, was 2.5 copies per cell (FIG. 25E) and not significantly different between the vectors. This indicated that the integration of the “long” 32.4 kb transposon was as efficient as the integration of the “short” 11.8 kb transposon. SB100x-mediated integration of the 32.4 kb transposon after in vivo HSPC transduction with the vectors did not cause hematological abnormalities (week 20) in spite of γ-globin expression in the vast majority of erythroid cells (FIG. 26B). The composition of cellular bone marrow (FIG. 26C) and the colony forming-potential of bone marrow Lin⁻ cells (FIG. 26D) were not significant between groups.

[0848] In a secondary transplant to demonstrate in vivo transduction and SB100x-mediated integration occurred in long-term repopulating HSPCs, the composition of cellular bone marrow (FIG. 26C) and the colony forming-potential of bone marrow Lin⁻ cells (FIG. 26D) were not significant between groups. Transplanted bone marrow Lin− cells were harvested at week 20 after in vivo HSPC transduction into lethally irradiated C57Bl/6 mice without hCD46 transgene). The ability of transplanted cells to drive the multi-lineage reconstruction in secondary recipients was assessed over a period of 16 weeks. As in the “primary” in vivo HSPC transduced mice, no effect of the high-level globin expression on the cellular composition of bone marrow or hematological parameters in the peripheral blood were observed.

[0849] Bone marrow Lin⁻ cells harvested at week 20 were also used to perform a genome-wide integration site analysis. In this assay, a linear amplification-mediated PCR (LAM-PCR) strategy is followed by sequencing of integration junctions (FIG. 27). The distribution of integration sites over the mouse genome is shown in FIG. 28A. The integrated transgene cassette was precisely processed, and the identified IR/DR chromosome junctions contained TA dinucleotides (FIG. 28B). The vast majority of integrations were within intergenic and intronic regions at a frequency of 83% and 17%, respectively (FIG. 28C). The integration was random without preferential integration in any given window of the whole mouse genome (FIG. 28D). No integration within or near a proto-oncogene was found. This SB100x-mediated integration pattern is in agreement with previous studies (Richter et al., Blood 128(18):2206-17, 2016; Neff et al, J Clin Invest 112(10):1581-8, 2003; Kemper et al., Clin Exp Immunol. 124(2):180-9, 2001; Zhang et al., PLoS One 8(10):e75344, 2013; Yant et al., Nat Biotechnol 20(10):999-1005, 2002).

[0850] Analysis of secondary recipients. To demonstrate that in vivo transduction occurred in long-term repopulating HSPCs, bone marrow Lin⁻ cells harvested at week 20 after in vivo HSPC transduction were transplanted with HDAd-short-LCR and HDAd-long-LCR, into lethally irradiated C57Bl/6 mice (without the hCD46 transgene). The ability of transplanted cells to drive the multi-lineage reconstitution in secondary recipients was assessed over a period of 16 weeks. Engraftment rates based on CD46 expression in PBMCs were 95% and remained stable (FIG. 29A). γ-globin marking of RBCs measured by flow cytometry was in the range of 90 to 95% and stable (FIG. 29B). There was no significant difference between the two vectors in the percentage of γ-globin⁺ RBCs. The average integrated vector copy number also did not differ significantly between the two vectors indicating that integration of both transposons in long-term repopulating cells was equally efficient (FIG. 29C). Interestingly, the percentage of γ-globin to mouse adult globin chains increased over time for the HDAd-long-LCR vector reaching 20-25% of mouse α-globin (FIGS. 29D and 29E). In contrast, the percentage of γ-globin/mouse α-globin in secondary recipients of HDAd-short-LCR transduced bone marrow cells did not increase. The percentage of γ-globin expressing erythroid cells was significantly higher for HDAd-long-LCR (FIG. 29F). In addition to conferring higher γ-globin expression levels, the long LCR also provided more stringent erythroid-specific expression as shown by a significantly higher percentage of γ-globin expressing bone marrow cells in the erythroid (Ter119⁺) fraction vs the non-erythroid fraction (Ter119⁻) (FIG. 27H). The vector number copy per cell in bone marrow MNCs were not statistically significant between HDAd-short-LCR and HDad-long-LCR when harvested at week 16 after in vivo HSPC transduction (FIG. 27I). As in the “primary” in vivo HSPC transduced mice, no effect of high-level globin expression on the cellular composition of the bone marrow or hematological parameters in the peripheral blood were observed (FIGS. 30A-30D).

[0851] Comparison of the two vectors after human CD34+ transduction, in vitro selection, and erythroid differentiation. The function of the human β-globin LCR in a heterologous system like mouse erythroid cells could be suboptimal due to lack of conservation of transcription factors that bind within the LCR. An in vitro study in human cells was, therefore, performed (FIG. 31A). Human CD34+ cells obtained from GCSF-mobilized healthy donors were transduced with HDAd-long-LCR+HDAd-SB or HDAd-short-LCR+HDAd-SB at a total MOI of 4000 vp/cells, i.e. a MOI that confers the transduction of the majority of CD34+ cells (Li et al., Mol Ther Methods Clin Dev 9: 390-401, 2018). Transduced cells were then subjected to erythroid differentiation (ED) and O⁶BG/BCNU selection for cells with integrated transgenes. During expansion of transduced cells over 18 days, most of episomal vectors are lost. At the end of ED, significantly higher percentages of γ-globin⁺ anucleated cells (i.e. reticulocytes that lost the nucleus) were found for the HDAd-long-LCR+HDAd-SB setting by flow cytometry (FIG. 31B). HPLC analysis also demonstrated significantly higher γ-globin chain levels in HDAd-long-LCR+HDAd-SB-transduced cells (FIG. 31C).

[0852] HDAd-short-LCR vs HDAd-long-LCR in vivo HSPC transduction studies in a mouse model of thalassemia intermedia [symbol] -globin levels. For these studies (over 4 rounds) (CD46+/+) mice were bred with Hbbth³ mice heterozygous for the mouse Hbb-beta1 and -beta2 gene deletion (Yoshida et al., Sci Rep 7:43613, 2017). Resulting Hbb^{th3}/CD46+/+ mice has the typical phenotype of thalassemia intermedia (Wang et al., J Clin Invest, 129: 598-615. 2019). Hbb^{th3}/CD46+/+ mice were mobilized, intravenously injected with HDAd-long-LCR and HDAd-short-LCR vector systems, and four weeks later subjected to in vivo selection (FIGS. 32A and 32E). Importantly, [symbol] -globin marking in peripheral red blood cells was on average 40% already after the second cycle of in vivo selection, reached >90% in 9 out of 10 mice after the third cycle, and plateaued near 100% in all mice at week 12 after in vivo transduction with HDAd-long-LCR (FIGS. 32B and 32F). in contrast, for mice transduced with HDAd-short-LCR, it required four in vivo selection cycles to reach 100% [symbol] -globin marking in RBCs in 2 out of 7 mice and 100% marking was achieved only at week 16 post-transduction. At 100% marking rate, the percentage of human [symbol] -globin vs adult mouse α-globin chains (measured by HPLC) increased over time for both vectors (most likely due to the disease background) reaching an average of 22% (max: 35%) and 11% (max: 19%) by week 16 after in vivo transduction with HDAd-long-LCR and HDAd-short-LCR, respectively (FIGS. 32G and 32H; FIGS. 32C and 32D for week 21 data). Similar to what was observed in CD46tg mice, analysis of bone marrow mononuclear cells showed comparable VCNs for both vectors and higher globin expression levels in erythroid cells for HDAd-long-LCR (FIG. 33). In summary, these data demonstrate the superiority of HDAd-long-LCR over HDAd-short-LCR by i) requiring less intense in vivo selection to reach 100% marking and achieving γ-globin levels in RBCs, that, in theory, should be curative in patients with SCD and thalassemia major.

[0853] Correction of hematological parameters. Phenotypic correction is shown at different time points. Micrographs comparing the normalized erythrocyte morphology of C57BL6 and Townes SCA mice, before treatment and at week 10 after treatment with long LCR (FIG. 34) and micrographs showing the normalized erythropoiesis (reticulocyte count) for Townes mice, before treatment, and Townes mice at week 10, after treatment with long LCR are shown (FIG. 35). At week 14, blood cell morphology stained with Giemsa stain and May-Grunwald stain are shown (FIG. 36A). At week 16 after treatment, mice were sacrificed. Indicative of the reversal of the thalassemic phenotype in peripheral blood smears of the treated Hbb^{th3}/CD46+/+ mice, the hypochromic, highly fragmented and anisopoikilocytic baseline RBCs were replaced by near normochromic, well-shaped RBCs (FIG. 37A, left panels, see FIG. 36B for week 21 data). The level of reticulocytes in peripheral blood was comparable to normal CD46tg mice (FIG. 37A, right panels, see also FIG. 39). Analogous data for week 21 can be found in FIG. 36B, in the right panel. In bone marrow cytospins, in contrast to the blockade of erythroid lineage maturation in bone marrow of Hbb^{th3}/CD46+/+ mice, represented by the prevalence of basophilic erythroblasts, in cytospins from control and treated Hbb^{th3}/CD46+/+ mice, maturing polychromatic and orthochromatic erythroblasts predominated (FIG. 37B, see FIG. 36C for week 21 data). The normalized erythrocyte parameters of mice transduced with long LCR, short LCR, and control CD46tg vectors are shown (FIG. 38). Hematological parameters at week 16 post in vivo transduction were significantly improved compared to pre-treatment parameters for both vectors (FIGS. 38, 39A). For white blood cells, red blood cells, MCHC, MCV, and RDW-CV they were indistinguishable from the CD46tg controls (FIG. 39A). However, there were significant differences in favor of animals treated with HDAd-long-LCR vector vs HDAd-short-LCR, specifically, the percentage of reticulocytes in peripheral blood was 40.9 vs 26.8 vs 9.2% for non-treated, HDAd-short-LCR, and HDAd-long-LCR-treated Hbb^{th3}/CD46+/+ mice, respectively (FIG. 38). Furthermore, hemoglobin levels and hematocrit were higher for the HDAd-long-LCR-treated group.

[0854] Correction of extramedullary hematopoiesis and hemosiderosis. Spleen size, a measurable characteristic of compensatory hemopoiesis was reduced to normal in animals treated with both vectors, whereby there was no significant difference between HDAd-long-LCR and HDAd-short-LCR (FIG. 40A). In contrast to Hbb^{th3}/CD46+/+ mice, no foci of extramedullary erythropoiesis were observed on spleen and liver sections after treatment with HDAd-long-LCR and only limited extramedullary erythropoiesis was detected in the HDAd-short-LCR-treated mice (FIG. 40B). Intense hemosiderosis in spleen and liver was prominent in the untreated Hbb^{th3}/CD46+/+ mice (FIG. 41, second panel. Signals after Perl's staining of the tissues were comparably low for CD46tg (FIG. 41, first panel) and HDAd-long-LCR treated Hbb^{th3}/CD46+/+ mice (FIG. 41, third panel(, whereas 2.7(+/−0.8)-fold more blue spots per cm² spleen tissue were counted for HDAd-short-LCR vs HDAd-long-LCR-treated animals (N=5).

[0855] In summary, reticulocytes, blood parameters, extracellular hematopoiesis and hemosiderosis in HDAd-long-LCR-treated animals were not significantly different from control CD46tg mice, indicating a complete phenotypic correction. Furthermore, HDAd-long-LCR proved to be superior over HDAd-short-LCR in curing thalassemic mice in several phenotypic parameters, most likely due to higher γ-globin levels expressed from the long-LCR.

[0856] Comparison of the two vectors after human CD34+transduction and erythroid differentiation. To consolidate the data in mice, an in vitro study was performed in human cells (FIG. 31A). Human CD34+ cells obtained from GCSF-mobilized healthy donors were transduced with HDAd-long-LCR+HDAd-SB or HDAd-short-LCR+HDAd-SB at a total MOI of 4000 vp/cells, i.e. a MOI that confers the transduction of the majority of CD34+ cells (Yang et al., Proc Natl Acad Sci USA. 92(25):11608-12, 1995). Transduced cells were then subjected to erythroid differentiation (ED) and O⁶BG/BCNU selection for cells with integrated transgenes. During expansion of transduced cells over 18 days, most of episomal vectors are lost.

[0857] Bone marrow was harvested at week 21 after in vivo HSC transduction of Hbb^{th3}/CD46tg mice. (FIG. 42A) Vector copy number per cell in bone marrow MNCs. The difference between the two groups is not significant but could become significant if analyzed with greater sample size. (FIGS. 42B, 42C) Erythroid specificity of γ-globin expression. (FIG. 42B) Percentage of γ-globin expressing erythroid (Ter119⁺) and non-erythroid (Ter119⁻) cells. *p<0.05. Statistical analyses were performed using two-way ANOVA.

[0858] Extramedullary hemopoiesis by hematoxylin/eosin staining in liver and spleen sections from CD46tg and CD46^{+/+}/Hbb^{th-3} mice prior to administration of an adenoviral donor vector (FIG. 43). Iron deposition is shown by Perl's staining as cytoplasmic blue pigments of hemosiderin in spleen.

[0859] At the end of ED, significantly higher percentages of γ-globin⁺ enucleated cells (i.e. reticulocytes that lost the nucleus) were found by flow cytometry (FIG. 31B) and also significantly higher [symbol] -globin chain levels by HPLC in the HDAd-long-LCR vs HDAd-short-LCR setting (FIG. 31C). The vector copy number measured at day 18 was 2 for both vectors (FIG. 31D).

[0860] In summary, the ex vivo and in vivo HSPC transduction studies with mice as well as the in vitro studies with human HSPCs support the relevance of HDAd-long-LCR for gene therapy of hemoglobinopathies.

[0861] Discussion This Example describes work relevant to the clinical development of an in vivo HSPC gene therapy approach that does not require leukapheresis, myeloablation and HSPC transplantation (Richter et al, Blood. 128(18):2206-17, 2016). These are critical obstacles to a wide-spread application for ex vivo HSPC gene therapy of hemoglobinopathies, particularly in older patients and patients with comorbidities. The safety and efficacy of this approach has been demonstrated in several murine disease models (Wang et al., J Clin Invest. 129(2):598-615, 2019; Wang et al., Blood Adv. 3(19):2883-94, 2019; Li et al., Mol Ther Methods Clin Dev. 9:390-401, 2018) and, recently, in non-human primates (Li et al., 23rd Annual ASGCT meeting. 2020; abstract #546). In both species, a major problem associated with intravenous HDAd5/35++injection has been addressed, namely acute innate immune responses, by a prophylaxis regimen that blocked pro-inflammatory cytokines.

[0862] Reaching curative γ- or β-globin expression levels in thalassemia major and SCD patients in ex vivo HSPC gene therapy settings is still a challenge. It requires approaches to increase the number of integrated transgene copies by either optimizing the HSPC transduction process or by increasing the multiplicity of infection. Increasing the VCN however, bears the risk of inducing genotoxicity. Other attempts focus on further optimizing globin expression cassettes (Li et al., Cancer Res. 80(3):549-60, 2020). With high-payload capacity HDAd vectors, there is an opportunity to go beyond the genome size limitations set for lenti- and rAAV vectors. The present study demonstrates that curative levels of γ-globin can be achieved in RBCs by in vivo HSPC gene therapy with an integrating HDAd5/35++vector accommodating β-globin LCR/promoter elements with a total length of 29 kb.

[0863] In thalassemic mice, 100% γ-globin marking in RBCs was achieved earlier and with fewer cycle of O⁶BG/BCNU in vivo selection of mice treated with HDAd-long-LCR compared to HDAd-short-LCR treated animals. This is important for the clinical translation of the approach. While the O⁶BG/BCNU in vivo selection system allows for a controlled increase of the percentage of γ-globin positive RBCs, it also causes transient leukopenia and side effects on the GI-tract (Wang et al, J Clin Invest. 129(2):598-615, 2019). A potential explanation for the requirement of less intense in vivo selection with HDAd-long-LCR could be that the long LCR prevents silencing of the EF1 a promoter driving the expression of the mgmt^{P140K} gene that provides resistance to O⁶BG/BCNU. This hypothesis is supported by the observation that mgmt mRNA levels (normalized to VCN) in bone marrow MNCs were significantly higher for HDAd-long-LCR (FIG. 48).

[0864] While this study focused on therapeutic aspects of the in vivo approach using HDAd-long-LCR, a number of mechanistic questions remain to be addressed in the future. One of these open questions is whether the long LCR prevents the transactivation of distant and neighboring genes. Furthermore, it is not completely clear whether the higher γ-globin expression levels from HDAd-long-LCR, which are also reflected at the mRNA level, are due to more active transcription initiation or less silencing of integrated vector copies, or both. The observation that in HDAd-long-LCR-treated Hbb^{th3}/CD46 mice, the percentage of γ-globin to mouse adult globin chains increased over time, a phenomenon that was also seen with in the CD46tg model in secondary recipients, could indicate that silencing, specifically in long-term repopulating cells, occurred over time and that the long-LCR protected against it. Higher mgmt^{P140K} mRNA levels per integrated vector copy (FIG. 48) also support the hypothesis that the long-LCR protects against silencing. To address these questions, future studies will focus on transduced CD34+ cell clones and will include genome-wide analysis using LAM-PCR/NGS (integration sites), chromosome conformation capture techniques, and RNA-Seq. A prerequisite for these studies would be that the SB100x transposase-mediated transgene integration and in vivo selection processes do not trigger undesired genomic alterations/rearrangements. In an attempt to assess this, RNA-Seq was performed on human CD34+ cells that stably expressed mgtm/GFP transgenes after SB100x-mediated integration and O⁶BG/BCNU selection in vitro (FIG. 47A). Modestly altered expression of only 176 genes was found, preferentially histone genes (FIG. 47B). This indicates that SB100x does not exert critical genotoxicity, which is also supported by the absence of clonal dominance in integration site analysis and the absence of hematological side effects in long-term studies.

[0865] The copy number of integrated transgenes analyzed in bone marrow MNCs 16 to 23 weeks after in vivo HSPC transduction/selection using the HDAd5/35++-based SB100x system was 2 copies per cell for transposons ranging from 13.8 (Wang et al., J Clin Invest. 129(2):598-615, 2019) to 32.4 kb. In order to form a catalytically primed transposon/transposase complex, the two ends of the transposon must be held together in close physical proximity by transposase molecules (Uchida et al., Nat Commun. 10(1):4479, 2019). This limitation has been addressed by incorporating frt sides into the HDAd vector which are recognized by the co-expressed Flpe recombinase leading to a circularization of the transposon (Turchiano et al., PLoS One. 9(11):e112712, 2014). The data reported here suggest that this process may make integration largely independent on the size of the transposon carried by HDAd5/35++ vectors.

[0866] This study demonstrates that using extended TAD/LCR core elements increases the expression level of a therapeutic transgene. While the β-globin LCR has been studied for decades, TAD core elements for other genes/clusters are less characterized. The median size of TAD is 880 kb. With further advancement of high-throughput chromosome conformation capture (3C) assay and its subsequent 4C, 5C and Hi-C protocols as well as fiber-Seq assays, the interrogation of the regulatory genome will progress at a rapid speed and, for gene therapy purposes, could deliver TADs that contain only critical core elements (Liu et al., BMC Genomics. 20(1):217, 2019).

[0867] In summary, the current Example shows that employing large regulatory elements in the context of HDAd5/35++ vectors for in vivo transduction of HSPCs in mice yielded a vector that confers γ-globin levels that meet gene expression thresholds thought to be curative for thalassemia major and Sickle Cell Anemia.

[0868] The human β-globin gene cluster lies in chromosome 11 and spans ˜100 kb. It has been proposed that the β-globin locus forms an erythroid-specific spatial structure composed of cis-regulatory elements and active β-globin genes, termed the active chromatin hub (ACH) (Tolhius et al., Mol Cell, 10:1453-1465, 2002). A core ACH is developmentally conserved and consists of the upstream 5′ DNAse hypersensitivity regions 1 to 5, called the globin LCR, and the downstream 3′HS1 as well as erythroid-specific transacting factors (Kim et al., Mol Cell Biol., 27:4551-65, 2007). For gene therapy applications, it is notable that a 23 kb β-globin LCR containing HS1 to HS5 plus a 3 kb 3′HS1 region conferred high-level, erythroid-specific, position independent expression upon cis-linked genes in transgenic mice (Grosveld, Cell, 51:975-985, 1987). A tool to deliver a transgene under the control of this LCR is available with 30+kb HDAd vectors.

[0869] The correction of many genetic diseases requires high level and tissue-restricted expression of the therapeutic gene, which can be accomplished by employing LCRs (Li et al., Blood 100: 3077-3086, 2002). For a cure of β-thalassemia major and Sickle Cell Anemia, it is thought that around 20% gene marking in HSPCs and 20% therapeutic-globin chain (β- or γ-globin) production in erythroid cells are required (Fitzhugh et al., Blood 130: 1946-1948, 2017). Due to size limitations, only truncated forms of the β-globin LCR can be used in lentivirus vectors which makes it difficult to meet the requirements for corrective gene expression levels (Uchida, et al., Nat Commun 10: 4479, 2019). A strategy to increase expression levels after lentivirus-mediated HSPC transduction is to increase the vector dose and thus the number of integrated transgene copies. This approach however enhances the risk of genotoxicity and tumorigenicity. Other attempts are focused on further optimizing globin expression cassettes (Uchida, et al., (2019) Nat Commun 10: 4479). HDAd vectors, having an insert capacity of 30 kb, are an ideal tool to develop the latter concept. In this Example, a HDAd5/35++ vector carrying a 29 kb γ-globin expression cassette was generated and tested after in vitro and in vivo HSPC transduction in CD46-transgenic mice.

[0870] In the HDAd vector system, the integration of the γ-globin cassette is mediated by the SB100x transposase. Non-viral gene transfer using the SB/transposon system is being used clinically for CD19 CAR T-cell therapy (Kebriaei et al., J Clin Invest 126: 3363-3376, 2016), age-related macular degeneration (Hudecek et al., Crit Rev Biochem Mol Biol 52: 355-380, 2017; Thumann et al., Mol Ther Nucleic Acids 6: 302-314, 2017), and Alzheimer's disease (Eyjolfsdottir et al., Alzheimers Res Ther 8: 30, 2016). HD-Ad mediated SB gene transfer was pioneered by the Kay and Ehrhardt groups. In their studies, transposons were relatively small; 4 kb-6 kb (Hausl et al., Mol Ther 18: 1896-1906, 2010; Yant et al., Nat Biotechnol 20: 999-1005, 2002). The current Example demonstrates for the first time that SB100x is capable of integrating a 32.4 kb transposon at an efficacy comparable to that of a 11.8 kb transposon, based on comparable VCNs (2-3 copies per cell). Per se this finding contradicts the observation that the efficacy of SB-mediated integration inversely correlates with the size of the SB transposon (Karsi et al., Mar Biotechnol (NY) 3: 241-245, 2001). The system appears to be lifted from the size limitation. First, in order to form a catalytically primed transposon/transposase complex, the two ends of the transposon must be held together in close physical proximity by transposase molecules (Hudecek et al., Crit Rev Biochem Mol Biol 52: 355-380, 2017). This limitation has been addressed by incorporating frt sides into the HDAd vector which are recognized by the co-expressed Flpe recombinase leading to a circularization of the transposon (Yant et al., Nat Biotechnol 20: 999-1005, 2002). The second mechanism limiting transposition of large constructs is a suicidal transpositional mechanism called auto-integration, i.e. the integration into TA dinucleotide inside the transposon (Wang et al., PLoS Genet 10: e1004103, 2014). The unseen differences in the VCN between HDAd-short-LCR and HDAd-long-LCR could be related to in vivo selection, which enriches for HSPCs and progenitors with a certain level of mgmt^{P140K} expression, i.e. for cells that have reached a threshold VCN.

[0871] Because of the powerful O⁶BG/BCNU in vivo selection system, nearly 100% of peripheral blood erythrocytes contained γ-globin. While this in vivo selection approach does not affect the cellular composition in the bone marrow, it results in leukopenia. Efforts are therefore focused on alternative approaches that do not involve the cytotoxic drug BCNU. Notably, as supported by the studies in the murine thalassemia model (Wang et al., J Clin Invest 129: 598-615, 2019), pharmaceutical in vivo selection might not be necessary in patients with hemoglobinopathies because gene-corrected HSPCs will have a proliferative advantage over non-corrected cells (Perumbeti et al., Blood 114: 1174-1185, 2009).

[0872] Given comparable VCNs for HDAd-short-LCR and HDAd-long-LCRs in primary animals and secondary recipients, γ-globin levels (measured by HPLC and qRT-PCR) in RBCs and bone marrow erythroid progenitors were significantly higher for the vector containing the long LCR. Interestingly, the differences between the two vectors were more pronounced in secondary recipients. This implies that RBCs that originated from transduced long-term repopulating HSPCs have higher γ-globin levels. Furthermore, HDAd-long-LCR displayed stronger erythroid specificity. These effects can be attributed to the additional LCR elements in HDAd-long-LCR that result in better access for transcription factors due to the LCR's chromatin opening ability (Li et al., Blood 100: 3077-3086, 2002), and/or the binding of additional transcription factors that result in increased transcription of the γ-globin gene. Another feature of the LCR is noteworthy, namely its ability to act as an autonomous regulatory unit, implying less transactivation of neighboring genes after random integration. In this context using a more complete LCR version decreases potential genotoxicity of the approach.

### Example 3. In Vivo HSC Gene Therapy Using a Combination of CRISPR-Triggered Reactivation of Endogenous Fetal Globin and SB100x Transposase-Mediated γ-Globin Gene Addition Cures Sickle Cell Disease in a Mouse Model

[0873] In patients with hereditary persistence of fetal globin and, more recently, in gene therapy patients, the degree of phenotypic correction of Sickle Cell Disease (SCD) correlates with the expression level of fetal γ-globin. It was recently reported that, after in vivo hematopoietic stem cell/progenitor (HSPC) transduction with HDAd5/35++ vectors, SB100x transposase-mediated γ-globin gene addition achieved 10-15% γ-globin of adult mouse globin, resulting in significant but incomplete phenotypic correction in a thalassemia intermedia mouse model. It has also been shown that genome editing of a γ-globin repressor binding site within the γ-globin promoter by CRISPR/Cas9 results in efficient reactivation of endogenous γ-globin. This example combines these two mechanisms to obtain curative levels of γ-globin after in vivo HSPC transduction.

[0874] A HDAd5/35++adenovirus vector (HDAd-combo) containing both modules was generated and tested in vitro and after in vivo HSPC transduction in “healthy” CD46/β-YAC mice and in a SCD mouse model (CD46/Townes), in which murine α- and β-globin genes were replaced with the human α-globin and human sickle β^{S}/fetal γ-globin genes. The present HDAd-combo contained a self-activating mechanism to reduce Cas9 expression after completion of target site cleavage. This resulted in significantly higher cleavage frequency in vivo, most likely due to better survival CRISPR/Cas9-edited HSPCs. Importantly, compared to HDAd vectors containing either the [symbol] -globin addition or the CRISPR/Cas9 reactivation units alone, significantly higher [symbol] -globin was found in RBCs after transduction with HDAd-combo. At week 13 after in vivo HSC transduction of CD46/Townes mice with the combo vector, the level of [symbol] -globin level in red blood cells was 30% of that of adult human α- and β^{S}-chains. This resulted in a complete phenotypic correction of SCD.

[0875] Introduction:

[0876] SCD gene therapy: Sickle Cell Disease and β-thalassemia are the most common monogenic disorders worldwide, with 317,000 affected neonates born each year. SCD is caused by a single mutation on the first exon of b-globin gene (β^{S} allele), resulting in the formation of defective hemoglobin tetramers, which polymerize upon low oxygen concentrations, leading to destruction of erythrocytes. SCD is associated with substantial morbidity, poor quality of life, and a shortened life expectancy. The clinical course of SCD is improved when fetal [symbol] -globin genes are highly expressed as seen in patients with HPFH traits (Conley et al., Blood 21: 261-281, 1963; Stamatoyannopoulos et al., Blood 46: 683-692, 1975). In SCD, [symbol] -globin exerts a potent anti-sickling function by competing with the sickle β-globin for incorporation in the Hb tetramers and by inhibiting sickle hemoglobin (HbS) polymerization. Pharmacological treatments increasing HbF levels are not equally effective in all patients. The development of gene therapy for β-hemoglobinopathies has been justified by the limited availability of matching donors and the narrow window of application of HSPC transplantation to the youngest patients. Current SCD gene therapy approaches involve the collection of HSPCs, their in vitro culture, transduction with lentivirus vectors carrying either an intact β-globin, an anti-sickling β-globin or, a fetal [symbol] -globin expression cassette, and retransplantation into myelo-conditioned patients. Phase I gene therapy trials with γ-globin gene addition lentivirus vectors are promising, however a long-term cure of all the SCD symptoms has so far not been achieved (Demirci et al., Hum Mol Genet., 2020. doi: 10.1093/hmg/ddaa088). For a cure of the disease, [symbol] -globin levels in RBCs must be at least 20% of adult α-globin, and optimally, β^{S} levels should be reduced. This is difficult to achieve with lenti-virus vectors, because of insert size limitations preventing the use of full-length globin LCRs or multi-modality genome editing cassettes (Uchida et al., Nat Commun 10: 4479, 2019).

[0877] In vivo HSPC gene therapy- [symbol] -globin gene addition: A major risk of ex vivo HSPC gene therapy is transplant-related morbidity (Anurathapan et al., Biol Blood Marrow Transplant 20: 2066-2071, 2014; Lucarelli et al., Blood Rev 16: 81-85, 2002; Storb et al., Hematology Am Soc Hematol Educ Program: 372-397, 2003). Furthermore, the use of lentivirus vectors bears the risk that transgene expression is silenced or chromosomal proto-oncogenes are activated. Importantly, the approach is complex, expensive, and therefore difficult to perform in countries with limited resources where SCD is prevalent. A simple in vivo HSPC gene therapy approach has been developed. It involves the subcutaneous injection of GCSF/AMD3100 to mobilize HSPCs from the bone marrow into the peripheral blood stream and the intravenous injection of an integrating helper-dependent adenovirus vector system, HDAd5/35++ vectors. These vectors have an insert capacity of 30+kb and target CD46, a receptor that is expressed on primitive HSPCs (Richter et al, Blood 128: 2206-2217, 2016). Innate toxicity associated with intravenous HDAd5/35++injection can be controlled by glucocorticoid, IL6- and IL1β-receptor antagonist pretreatment in mice and in non-human primates (Li et al., 23rd Annual ASGCT meeting. 2020; abstract #546) Random transgene integration is mediated by an activity-enhanced Sleeping Beauty transposase (SB100x) (Boehme et al., Mol Ther Nucleic Acids 5: e337, 2016). In this system, the transgene cassette is flanked by inverted repeats (IRs), which are recognized by the SB100x transposase and frt sites that allow for circularization of the transgene cassette in the presence of Flp recombinase. The second vector, HDAd-SB, supplies Flp recombinase and SB100x in trans to mediate integration of the GFP cassette into a TA dinucleotide of the genomic DNA (Mates et al., Nat Genet 41: 753-761, 2009). In a previous study with HDAd5/35++ vectors, a 4.3 kb HS1-HS4 mini-LCR (β-globin locus control region) was used in combination with a 0.66 kb β-globin promoter to drive human [symbol] -globin expression after in vivo HSPC transduction (Wang et al., J Clin Invest 129: 598-615, 2019; Li et al., Mol Ther Methods Clin Dev 9: 142-152, 2018). In Hbb^{th3}/CD46+/+ thalassemic mice, stable (8+months) [symbol] -globin marking was achieved in nearly 100% of peripheral blood erythrocytes and near complete phenotypic correction (Wang et al., J Clin Invest 129: 598-615, 2019). However, the level of [symbol] -globin expression was only 10-15% of that of adult mouse α-globin with an average integrated vector copy number (VCN) of 2 copies per cell, thus rendering the clinical translation of the approach to SCD particularly challenging.

[0878] In vivo HSPC gene therapy—reactivation of endogenous [symbol] -globin: In hereditary persistence of fetal hemoglobin (HPFH), a benign genetic condition, mutations attenuate γ-to-β globin switching, causing high fetal globin (HbF) levels throughout life thus alleviating the clinical manifestations of these disorders (Forget, Ann NY Acad Sci 850: 38-44, 1998). Early studies attempted to re-enact HPFH mutations by either creating large deletions within the β-globin locus (Sankaran, Hematology Am Soc Hematol Educ Program 2011: 459-465, 2011), or by introduction of mutations in the HBG promoters can increase the levels of HbF in erythroid cells (Wienert et al., Nat Commun 6: 7085, 2015; Traxler et al, Nat Med 22: 987-990, 2016; Lin et al., Blood 130: 284, 2017). With the discovery of BCL11A as a fetal globin repressor, these attempts became more focused involving the targeted disruption of the BCL11A binding site within the HBG promoters (Masuda et al., Science 351: 285-289, 2016) or the disruption of the erythroid bcl11a enhancer to reduce BCL11A expression (Wu et al., Nat Med 25: 776-783, 2019) by either CRISPR/Cas9 or, recently, base editors (Zeng et al., Nat Med 26: 535-541, 2020). An HBG1/HBG2 promoter targeted CRISPR/Cas9 was employed to reactivate γ-globin in human β-globin locus-transgenic (β-YAC) mice (Li et al., Blood 131: 2915-2928, 2018). After in vivo HSPC transduction, efficient target site disruption resulting in a pronounced switch from human β- to [symbol] -globin expression in red blood cells of adult mice that was maintained after secondary transplantation of HSPCs was demonstrated. In long-term follow up studies, hematological abnormalities were not detected, indicating that HBG promoter editing does not negatively affect hematopoiesis.

[0879] It was previously reported that expression of CRISPR/Cas9 from HDAd5/35++ vectors can compromise the stem cell function and survival of transduced HSPCs, specifically human HSPCs (Li et al., Mol Ther Methods Clin Dev 9: 390-401, 2018). Therefore, approaches to shorten CRISPR/Cas9 expression were developed (Li et al., Mol Ther Methods Clin Dev 9: 390-401, 2018; Li et al., Mol Ther 27: 2195-2212, 2019).

[0880] Here, the aim was to achieve curative levels of γ-globin after in vivo HSPC transduction by combining SB100x-mediated [symbol] -globin gene addition and reactivation of [symbol] -globin in β-YAC mice as well as in mouse model of Sickle Cell disease developed by Tim Townes (hα/hα::β^{S}/β^{S}) (Wu et al., Blood 108: 1183-1188, 2006). In this model, the murine α-globin genes were replaced with the human α-globin and the murine adult β-globin genes were replaced with human sickle β^{S} and fetal γ-globin genes linked together. This model displays key phenotypic features of Sickle Cell Disease.

[0881] Materials and Methods

[0882] Reagents: G-CSF (Neupogen™) (Amgen Thousand Oaks, Calif.) and AMD3100 (Sigma-Aldrich, St. Louis, Mo.) were used. O⁶-BG and BCNU were from Sigma-Aldrich (St, Louis, Mo.).

[0883] HDAd vectors: The HDAd-CRISPR (“cut”), HDAd-SB-addition (“add”) and HDAd-SB have been described previously (Li et al., Blood 131(26):2915-2928, 2018; Wang et al., J Clin Invest 129: 598-615, 2019). The cloning of pHCA-Combo involved 3 steps. Step 1) The sgHBG #2 (SEQ ID NO: 258) targeting the BCL11A binding site in HBG1/2 promoter regions was synthesized, annealed and inserted into the BbsI site of pSPgRNA (Addgene, Cambridge, Mass.), generating pSP-sgHBG #2. The 0.4 kb U6-sgHBG #2 fragment in pSP-sgHBG #2 was amplified and cloned to the BamHI site of pBST-sgAAVS1-miR (Li et al., Mol Ther 27: 2195-2212, 2019), obtaining pBST-sgHBG #2-miR. Step 2) A 1.5 kb PGK-mgmt-bGHpolyA fragment was synthesized as gBlock (IDT, Newark, N.J.) and ligated with ClaI-digested pBS-LCR-globin-mgmt (Li et al., Mol Ther 27: 2195-2212, 2019), getting pBS-LCR-globin-PGK-mgmt. Next, a 4.8 kb sequence containing the pBS-Frt-IR region was amplified from pBS-FRT-IR-Ef1α-mgmt (Li et al., Cancer Res 80: 549-560, 2020) and ligated with EcoRV-KpnI digested pBS-LCR-globin-PGK-mgmt, leading to pBS-Frt-IR-LCR-globin-PGK-mgmt. In this step primers containing 15 bp homology arms (HAs) for later infusion cloning (Takara, Mountain View, Calif.) were used. The two 15 bp HAs flanking the two Frt-IR components can be exposed upon PacI digestion to facilitate recombination with the modified pHCA construct described below. Step 3) The 5.3 kb XbaI fragment of pHCAS1S-MCS (Li et al., Mol Ther 27: 2195-2212, 2019) was deleted by XbaI restriction and re-ligation, generating pHCAS1S1-MCS. A 7.6 kb CRISPR cassette starting from the U6 promoter to the SV40 polyA signal sequence was amplified from pBST-sgHBG #2-miR and cloned to the NheI site of pHCAS1S1-MCS, forming pHCAS1S1-MCS-sgHBG #2. Lastly, the 12.0 kb HA-flanked Globin/mgmt cassette in pBS-Frt-IR-LCR-globin-PGK-mgmt was released by PacI treatment and recombined with PacI-digested pHCAS1S1-MCS-sgHBG #2, resulting in pHCA-Combo. The final construct was screened by several restriction enzymes (HindIII, EcoRI and PmeI) and confirmed by sequencing the whole region containing transgenes.

[0884] For the production of HDAd5/35++ vectors, corresponding plasmids were linearized with PmeI and rescued in 116 cells (Palmer & Ng, Mol Ther 8: 846-852, 2003) with AdNG163-5/35++, an Ad5/35++ helper vector containing chimeric fibers composed of the Ad5 fiber tail, the Ad35 fiber shaft, and the affinity-enhanced Ad35++fiber knob (Richter et al., Blood 128: 2206-2217, 2016). HD-Ad5/35++ vectors were amplified in 116 cells as described in detail elsewhere (Palmer & Ng, Mol Ther 8: 846-852, 2003). Helper virus contamination levels were found to be <0.05%. Titers were 2-5×10¹² vp/ml.

[0885] Vectors of the present Example are illustrated in FIG. 101, and include an HDAd combination adenoviral vector that includes both (i) a nucleic acid encoding a γ-globin transgene (“addition”) present in a transposon and (ii) a nucleic acid encoding a CRISPR/Cas9 system targeting HBG1/2 (“CRISPR”) for increased expression of endogenous γ-globin, not present in the transposon (the two together form the “Combination”). For further disclosure in relation to dual vectors, see also FIGS. 96, 102, 97A-97D, 98A-98N, 99A-99U).

[0886] Specifically, FIG. 96 shows the schematic of HDAd-Tl-combo vector in which the CRISPR system targets two different sites (HBG promoter and erythroid bcl11a enhancer), which leads to increased gamma reactivation. FIG. 102 shows how, in HDAd-combo, the interaction of Flpe recombinase with the frt sites leads to a circularization of the transposon, leaving linear fragment of the vector containing the CRISPR cassette. Previous studies with the SB100x/Flpe system demonstrated that these vector parts are rapidly lost while the circularized transposon is integrated into the host genome by SB100x (Yant et al., Nat Biotechnol., 20: 999-1005, 2002). FIG. 97A shows how upon co-infection of HDAd-SB and HDAd-combo, Flpe will be expressed and release the IR-flanked transposon, which will then be integrated into the genome by SB100x transposase. Simultaneously, HBG1 and bcl11a-E CRISPRs will be expressed and generate DNA indels that will lead to reactivation of γ-globin. Upon Flp-mediated release of the transposon, the CRISPR cassette will be degraded, thereby avoiding cytotoxicity. The CRISPR system targets two different sites (HBG promoter and erythroid bcl11a enhancer), which leads to increased γ reactivation. The targeting strategy (FIG. 97B), erythroid specific BCL11A enhancer (FIG. 97C), and BCL11A binding site at HBG promoter (FIG. 97D) are also shown.

[0887] Dual CRISPR vectors and [symbol] -globin reactivation are shown in FIGS. 98A-98N. The vector designs for HDAd-Bcl11ae-CRISPR, HDad-HBG-CRISPR, HDAd-Dual-CRISPR, HDAd-scrambled (FIG. 98A) and HD-Ad5/35++CRISPR Vectors for dual gRNA vector (FIG. 98B) are shown. HD-Ad5/35++CRISPR transduction of a human erythroid progenitor cell line (HUDEP-2) is shown before and after differentiation in FIG. 98C. The HD-AD5/35++“Dual” gRNA vector does not negatively affect cell viability (FIG. 98D) nor proliferation (FIG. 98E) compared to untreated (UNTR), BCL11A, or HBG vectors. The Dual vectors achieve similar editing levels similar to those observed with the single gRNA vectors for the target loci (FIG. 98F) Bcl11a enhancer and (FIG. 98G) HBG promoter. Furthermore, the HD-AD5/35++“Dual” gRNA vector achieves editing levels of target loci similar to those observed with the single gRNA vectors (FIG. 98H). A significantly higher percentage of HbF+ cells were observed by flow cytometry in HUDEP-2 cells transduced with the HD-Ad5/35 “Dual” gRNA vector compared to the single gRNA vectors (FIG. 98I). The overall gamma globin expression, measured by HPLC, was significantly higher in the dual targeted samples (FIG. 98J). A significantly higher fetal globin expression in double knock-out clones than single knock-out clones was observed implying a possible synergistic effect of the two mutations, leading to higher gamma expression/cell (FIG. 98K). FIG. 98L shows that peripheral blood mobilized CD34+ cells were transduced with the HDAd5/35++ CRISPR vectors. To minimize CRISPR/Cas9 cytotoxicity, cells were subsequently transduced with an HDAd5/35++ vector that expresses anti-Cas9 peptides. Cells were transplanted into sub-lethally irradiated NSG mice and analyzed. At week 10 after transplantation, cells transduced with the HD-Ad5/35 “Dual” gRNA vector exhibited similar engraftment to the cells transduced with the single gRNA vectors. Lineage composition was similar in all groups (FIG. 98M). CD34+ cells transduced and edited by the double gRNA vector, efficiently engrafted in NSG mice (FIG. 98N). Furthermore, the engrafted dual targeted cells after erythroid differentiation expressed higher levels of gamma globin to the control, compared to the single targeted cells, despite the relatively lower editing levels (FIG. 98N).

[0888] The experimental design for the ex vivo transduction of double edited normal and that CD34+ cells is shown in FIG. 99A. HBF expression (FIG. 99B), MFI (FIG. 99C), and flow cytometry data describing HBF expression (FIG. 99D) in colonies on day 15 for normal CD34+ cells are shown. HBF expression (FIG. 99E) and MFI (FIG. 99F) after erythroid differentiation (ED) for normal CD34+ cells are shown. TE71 for HBG site (FIG. 99G) and TE71 for BCL11A site (FIG. 99H) are shown 48 hours post transduction (txd) in normal CD34+ cells. Flow cytometry data describing HBF expression in EC and erythroid differentiation can be found in FIG. 99I. FIGS. 99J-99U show results in ThaI CD34+ cells. The immunophenotype of cells at day 0, untransduced cells and cells transduced with CRISPR-Dual (FIG. 99J) and a growth curve comparing untransduced cells and cells transduced with CRISPR-Dual (FIG. 99K) over 11 days. HBF expression (FIG. 99L) and MFI (FIG. 99M) are shown in colonies on day 15. HBF expression in EC (FIG. 99P), MFI (FIG. 99Q), and flow cytometry data describing HBF expression and PO4 and P18 (FIG. 99R) are also shown. TE71 for HBG site erythroid differentiation at p04 (FIG. 99S) and p18 (FIG. 99T) are shown while FIG. 99U shows TE71 for the BCL11A site 48 hours after transduction.

[0889] HUDEP-2 cells/erythroid differentiation: HUDEP-2 cells (Kurita et al., PLoS One 8: e59890, 2013) were cultured in StemSpan SFEM medium (STEMCELL Technologies) supplemented with 100 ng/ml SCF, 3 IU/ml EPO, 10⁻⁶ M dexamethasone and 1 μg/ml doxycycline (DOX). Erythroid differentiation was induced in IMDM containing 5% human AB serum, 100 ng/ml SCF, 3 IU/ml EPO, 10 μg/ml Insulin, 330 μg/ml transferrin, 2 U/ml Heparin and 1 μg/ml DOX for 6 days.

[0890] Colony-forming unit (CFU) assay: The lineage minus (Lin⁻) cells were isolated by depletion of lineage-committed cells in bone marrow MNCs using the mouse lineage cell depletion kit (Miltenyi Biotec, San Diego, Calif.) according to the manufacturer's instructions. CFU assays were performed using ColonyGEL (Reachbio, Seattle, Wash.) with mouse complete medium according to the manufacturer's protocol. Colonies were scored 10 days after plating.

[0891] T7EI mismatch nuclease assay: Genomic DNA was isolated using PureLink Genomic DNA Mini Kit per provided protocol (Life Technologies, Carlsbad, Calif.) (Miller et al., Nat Biotechnol 25: 778-785, 2007). A genomic segment encompassing the targeted site of HBG1/2 promoter was amplified by PCR primers: HBG1/2 forward (SEQ ID NO: 270), reverse (SEQ ID NO: 271). PCR products were hybridized and treated with 2.5 Units of T7EI (NEB) for 20 minutes at 37° C. Digested PCR products were resolved by 10% TBE PAGE (Bio-Rad) and stained with ethidium bromide. 100 bp DNA Ladder (New England Biolabs) were used. Band intensity was analyzed using ImageJ software. % cleavage=(1-sqrt(parental band/(parental band+cleaved bands))×100%.

[0892] Flow cytometry: Cells were resuspended at 1×10⁶ cells/100 μL in PBS supplemented with 1% FCS and incubated with FcR blocking reagent (Miltenyi Biotech, Auburn Calif.) for ten minutes on ice. Next the staining antibody solution was added in 100 μL per 10⁶ cells and incubated on ice for 30 minutes in the dark. After incubation, cells were washed once in FACS buffer (PBS, 1% FBS). For secondary staining the staining step was repeated with a secondary staining solution. After the wash, cells were resuspended in FACS buffer and analyzed using a LSRII flow cytometer (BD Biosciences, San Jose, Calif.). Debris was excluded using a forward scatter-area and sideward scatter-area gate. Single cells were then gated using a forward scatter-height and forward scatter-width gate. Flow cytometry data were then analyzed using FlowJo (version 10.0.8, FlowJo, LLC). For flow analysis of LSK cells, cells were stained with biotin-conjugated lineage detection cocktail (Miltenyi Biotec, San Diego, Calif.) (cat #: 130-092-613) and antibodies against c-Kit (cat #:12-1171-83) and Sca-1 (cat #: 25-5981-82) as well as APC-conjugated streptavidin. Other antibodies from eBioscience (San Diego, Calif.) included anti-mouse LY-6A/E (Sca-1)-PE-Cyanine7 (clone D7), anti-mouse CD117 (c-Kit)-PE (Clone 2B8), anti-mouse CD3-APC (clone 17A2) (cat #:17-0032-82), anti-mouse CD19-PE-Cyanine7 (clone eBio1D3) (cat #: 25-0193-82), and anti-mouse Ly-66 (Gr-1)-PE, (clone R66-8C5) (cat #: 12-5931-82. Anti-mouse Ter-119-APC (clone: Ter-119) (cat #: 116211) was from Biolegend (San Diego, Calif.).

[0893] Intracellular flow cytometry detecting human γ-globin expression: The FIX & PERM™ cell permeabilization kit (Thermo Fisher Scientific) was used and the manufacture's protocol was followed. Briefly, 1×10⁶ cells were resuspended in 100 μl FACS buffer (PBS supplemented with 1% FCS), 100 μl of reagent A (fixation medium) was added and incubated for 2-3 minutes at room temperature, 1 ml pre-cooled absolute methanol was then added, mixed and incubated on ice in the dark for 10 minutes. The samples were then washed with FACS buffer and resuspended in 100 μl reagent B (permeabilization medium) and 1 μg hemoglobin γ antibody (Santa Cruz Biotechnology, cat #sc-21756 PE), incubated for 30 minutes at room temperature. After the wash, cells were resuspended in FACS buffer and analyzed.

[0894] Globin HPLC: Individual globin chain levels were quantified on a Shimadzu Prominence instrument with a SPD-10AV diode array detector and an LC-10AT binary pump (Shimadzu, Kyoto, Japan). Vydac 214TP™ C4 Reversed-Phase columns for polypeptides (214TP54 Column, C4, 300 A, 5 μm, 4.6 mm i.d.×250 mm) (Hichrom, UK) were used. A 40%-60% gradient mixture of 0.1% trifluoroacetic acid in water/acetonitrile was applied at a rate of 1 mL/min.

[0895] Measurement of vector copy number: For absolute quantification of adenoviral genome copies per cell, genomic DNA was isolated from cells using PureLink Genomic DNA Mini Kit per provided protocol (Life Technologies), and used as template for qPCR performed using the power SYBR™ green PCR master mix (Thermo Fisher Scientific). The following primer pairs were used: human γ-globin forward (SEQ ID NO: 195), and reverse (SEQ ID NO: 196); rngrnt forward (SEQ ID NO: 220), and reverse (SEQ ID NO: 221).

[0896] Real-time reverse transcription PCR: Total RNA was extracted from 5×10\hat{ }6 differentiated HUDEP-2 cells or 100 μl blood by using TRIzol™ reagent (Thermo Fisher Scientific) following the manufacture's phenol-chloroform extraction method. Quantitect reverse transcription kit (Qiagen) and power SYBR™ green PCR master mix (Thermo Fisher Scientific) were used. Real time quantitative PCR was performed on a StepOnePlus real-time PCR system (AB Applied Biosystems). The following primer pairs were used: mouse RPL10 (house-keeping) forward (SEQ ID NO: 189), and reverse (SEQ ID NO: 190); human γ-globin forward (SEQ ID NO: 191), and reverse (SEQ ID NO: 192); human β-globin forward (SEQ ID NO: 216), and reverse (SEQ ID NO: 217); mouse β-major globin forward (SEQ ID NO: 193), and reverse (SEQ ID NO: 194), mouse a globin forward (SEQ ID NO: 212), and reverse (SEQ ID NO: 213).

[0897] Cas9 Western Blot: 3×10⁶ HUDEP-2 cells were harvested at various time points after transduction, washed twice with PBS, and lysed with Laemmli buffer with 5% β-mercaptoethanol. The samples were boiled at 95° C. for 5 minutes and cleared by centrifugation at 13,000 g for 10 minutes. 10 μL of lysates was separated by SDS-PAGE using 4-15% precast protein gels (Bio-Rad). The Cas9 protein in the blots was probed by anti-Cas9-HRP (clone 7A9-3A3) (Cell Signaling Technology, Danvers, Mass.). Chemiluminescence detection on X-ray films was performed after treatment with Pierce™ ECL Plus Western Blotting Substrate (Thermo Fisher Scientific). After Cas9 detection, the blots were stripped and re-probed by an anti-β-actin antibody from Sigma-Aldrich (Clone AC-74) for internal control.

[0898] Animals: All experiments involving animals were conducted in accordance with the institutional guidelines set forth by the University of Washington. The University of Washington is an Association for the Assessment and Accreditation of Laboratory Animal Care International (AALAC)-accredited research institution and all live animal work conducted at this university is in accordance with the Office of Laboratory Animal Welfare (OLAW) Public Health Assurance (PHS) policy, USDA Animal Welfare Act and Regulations, the Guide for the Care and Use of Laboratory Animals and the University of Washington's Institutional Animal Care and Use Committee (IACUC) policies. The studies were approved by the University of Washington IACUC (Protocol No. 3108-01). C57Bl/6 based transgenic mice that contained the human CD46 genomic locus and provide CD46 expression at a level and in a pattern similar to humans (hCD46+/+ mice) were described earlier (Kemper et al., Clin Exp Immunol 124: 180-189, 2001). Transgenic mice carrying the wildtype 248 kb β-globin locus yeast artificial chromosome (β-YAC) were used (Peterson et al., Ann NY Acad Sci 850: 28-37, 1998). β-YAC mice were crossed with human CD46+/+ mice to obtain β-YAC^{+/-}/CD46^{+/+} mice for in vivo HSPC transduction studies. The following primers were used for genotyping of mice: CD46 forward (SEQ ID NO: 233), and reverse (SEQ ID NO: 234); β-YAC ( [symbol] -globin promoter) forward (SEQ ID NO: 242), and reverse (SEQ ID NO: 243).

[0899] Sickle cell disease mouse model: A Townes male mouse (Hbb^{tm2(HBG1,HBB*)Tow} or hα/hα::β^{S}/β^{S}) was purchased from the Jackson Laboratory (JAX stock #013071) and bred with human CD46 transgenic female mice. As shown in FIG. 109A, after three rounds of breeding, mice homozygous for CD46, HbS and HBA were obtained and used for experiments. The following primers were used for genotyping: HBB primers (SEQ ID NOs: 246, 251, and 70), and HBA primers (SEQ ID NOs: 272-274); and CD46 primers as shown above (SEQ ID NOs: 233 and 234). The PCR results were interpreted according to the provided protocols by the vendor.

[0900] HSPC mobilization and in vivo transduction: HSPCs were mobilized in mice by s.c. injections of human recombinant G-CSF (5 μg/mouse/day, 4 days) followed by an s.c. injection of AMD3100 (5 mg/kg) on day 5. In addition, animals received Dexamethasone (10 mg/kg) i.p. 16 h and 2 h before virus injection. Thirty and 60 minutes after AMD3100, animals were intravenously injected with virus vectors through the retro-orbital plexus with a dose of 4×10¹⁰ viral particles (vp) per injection.

[0901] In vivo selection: Selection was started at one week (Townes model) or four weeks (β-YAC model) after transduction. Mice were injected with O⁶-BG (15 mg/kg, IP) two times, 30 minutes apart. One hour after the second injection of O⁶-BG, mice were injected (IP) with 5 mg/kg Carmustine (BCNU). At two and four weeks after the first round of selection, two more rounds were performed with BCNU doses at 7.5 and 10 mg/kg, respectively.

[0902] Immunosuppression: Mycophenolate mofetil (CellCept Intravenous) was from Genentech (Hillsboro, Oreg.). Rapamycin (Rapamune/Sirolimus) and methylprednisolone were from Pfizer (New York, N.Y.). Daily intraperitoneal injection of a mycophenolate mofetil (20 mg/kg/day), rapamycin (0.2 mg/kg/day), methylprednisolone (20 mg/kg/day) was performed.

[0903] Secondary bone marrow transplantation: Recipients were female C57BL/6 mice, 6-8 weeks old from the Jackson Laboratory. On the day of transplantation, recipient mice were irradiated with 1000 Rad. Bone marrow cells from in vivo transduced CD46tg mice were isolated aseptically and lineage-depleted cells were isolated using MACS as described above. Six hours after irradiation cells were injected intravenously at 1×10⁶ cells per mouse. The secondary recipients were kept for 16 weeks after transplantation for terminal point analyses. All secondary recipients received immunosuppression starting at week 4.

[0904] Tissue analysis: Spleen and liver tissue sections of 2.5 μm thickness were fixed in 4% formaldehyde for at least 24 hours, dehydrated and embedded in paraffin. Staining with hematoxylin-eosin was used for histological evaluation of extramedullary hemopoiesis. Hemosiderin was detected in tissue sections by Perl's Prussian blue staining. Briefly, the tissue sections were treated with a mixture of equal volumes (2%) of potassium ferrocyanide and hydrochloric acid in distilled water and then counterstained with neutral red. The spleen size was assessed as the ratio of spleen weight (mg)/body weight (g).

[0905] Blood analysis: Blood samples were collected into EDTA-coated tubes and analysis was performed on a HemaVet 950FS (Drew Scientific, Waterbury, Conn.). Peripheral blood smears were stained with Giemsa/May-Grunwald (Merck, Darmstadt, Germany) for 5 and 15 minutes, respectively. Reticulocytes were stained with Brilliant cresyl blue. The investigators who counted the reticulocytes on blood smears have been blinded to the sample group allocation. Only animal numbers appeared on the slides. (5 slides per animal, 5 random 1 cm² sections)

[0906] Statistical analyses: For comparisons of multiple groups, one-way and two-way analysis of variance (ANOVA) with Bonferroni post-testing for multiple comparisons was employed. Statistical analysis was performed using Graph Pad Prism version 6.01 (GraphPad Software Inc., La Jolla, Calif.).

[0907] Results and Discussion

[0908] HDAd-combo vector for [symbol] -globin gene addition and self-inactivating CRISPR/Cas9 for γ-globin re-activation: The 30 kb insert capacity of HDAd5/35++ vectors was capitalized on to incorporate two therapeutic cassettes into one vector (FIG. 100, upper panel, “HDAd-combo”): i) a cassette for [symbol] -globin gene addition by SB100x consisting of a HS1-HS4 mini-LCR in combination with a β-globin promoter to drive human [symbol] -globin expression (Wang et al., J Clin Invest 129: 598-615, 2019). This cassette is linked to the gene for a mutant O⁶-methylguanine-DNA methyltransferase (mgmt^{P140K}) under control of the ubiquitously active PGK promoter to allow for selection of stably transduced cells by low-dose O⁶BG/BCNU treatment (Neff et al., J Clin Invest 112: 1581-1588, 2003; Wang et al., Mol Ther Methods C.lin Dev 8: 52-64, 2018). The γ-globin/mgmt^{P140K} transposon cassette is flanked by frt sites and IRs, a CRISPR/Cas9 expression cassette that was placed outside the IR/frt flanked transposon. This module consists of a U6-promoter driven sgRNA targeting the BCL11A binding site within the HBG1/2 promoters and a SpCas9 under the control of the EF1α promoter. Co-infection of HDAd combo and HDAd-SB and expression of SB100x and Flpe recombinase will mediate integration of the IR-flanked γ-globin/mgmt^{P140K} cassette and simultaneously destroy the vector and stop CRISPR/Cas9 expression (FIG. 101). This shortened expression of CRISPR/Cas9 should increase the survival of genome-edited cells and the percentage of long-term repopulating cells. For comparison, HDAd5/35++ vectors were included in the study that contained the two different modules separately, HDAd-CRISPR (“cut”) and HDAd-SB-addition (“add”) (FIG. 100, middle panels-“HDAd-cut” and “HDAd-SB-add”).

[0909] Vector validation in HUDEP-2 cells: The hypothesis was first tested in Human Umbilical cord blood-Derived Erythroid Progenitor (HUDEP-2) cells (Kurita et al., PLoS One 8: e59890, 2013), an immortalized human hematopoietic stem and progenitor cell-derived erythroid precursor cell line that expresses BCL11A and predominantly β-globin and, only low levels of γ-globin. HUDEP-2 cells have been widely used for [symbol] -globin re-activation studies (Canver et al., Nature 527: 192-197, 2015). Four days after infection of HUDEP-2 cells with HDAd-combo+/−HDAd-SB at an MOI that transduces the vast majority of cells, cells were further expanded for 8 days in erythroid differentiation medium as described earlier (Li et al., Mol Ther 27: 2195-2212, 2019). Cas9 Western blot signals sharply declined once cells were subjected to differentiation/expansion, most likely due to the loss of episomal HDAd-combo vector copies (FIG. 103A). A schematic for controlled Cas9 expression using HDAd-combo vectors is shown in FIG. 102. Cas9 was however detectable for the period of the study 12 days. Co-infection with HDAd-SB reduced Cas9 expression 35% (Diff d3) to 50% (Diff d8) (FIG. 103B), indicating an effect of the self-inactivation mechanism described in FIG. 101. Analysis of [symbol] -globin marking by flow cytometry (FIG. 103C) suggested an additive effect of the γ-globin gene addition and reactivation modules.

[0910] In vivo HSPC transduction in CD46/β-YAC mice. It has been previously demonstrated human γ-globin reactivation CD46/β-YAC mice after in vivo HSPC transduction with and HDAd5/35++ vector targeting the HBG1/2 promoter (Li et al., Blood 131: 2915-2928, 2018). Here, a similar protocol was followed to evaluate the new HDAd-combo vector. CD46/β-YAC mice were mobilized with G-CSF/AMD3100, intravenously injected with the “cut”. “add” and “combo” vectors and, four weeks later, subjected to three rounds of in vivo selection (FIG. 104A). The percentage of γ-globin-positive RBCs increased with each round of in vivo selection reaching >95% for the “combo” vector 2 weeks after the last round of O⁶BG/BCNU injection (FIG. 104B). Reactivation with the “cut” vector was less efficient (60%) and more variable between animals. At week 18, RBC lysates were analyzed by HPLC for globin chains. The chromatogram shows distinct peaks for human β-globin, reactivated human G [symbol] /A [symbol] (HBG1/2) and the added 76-Ile G [symbol] variant (Li et al., Mol Ther Methods Clin Dev 9: 142-152, 2018) (FIG. 104C left panel, FIG. 105). Notably, the simultaneous reactivation of G [symbol] and A [symbol] was seen only in a small fraction of mice treated with the “cut” vector (FIG. 105). The majority of “cut” and “combo” vector-treated mice displayed only reactivated A [symbol] , most likely due to the deletion of the HBG2 gene as a result of simultaneous cleavage of the CRISPR/Cas9 in both the HBG1 and HBG2 promoters (Li et al., Blood 131: 2915-2928, 2018). FIG. 104C (right panel) shows γ-globin protein levels relative to human β-globin. On average, 7%, 11% and 17% γ-globin protein were detected for the “cut”, “add”, and “combo” vector, respectively. A similar pattern was seen on the mRNA level (FIG. 104D). While the difference between the “cut” and “add” vectors were not significant, the level of γ-globin for the “combo” vector was significantly higher. The percentage of CRISPR/Cas9-mediated cleavage of the HBG promoter target site measured at week 18 in PBMCs and bone marrow MNCs was significantly higher for the “combo” vector compared to the “cut” vector (FIG. 104E, FIG. 106). This is most likely due to the mechanism leading to reduced CRISPR/Cas9 expression, and, potentially, better survival of CRISPR-edited HSPCs that were then expanded by in vivo selection. The vector copy number in bone marrow MNCs was comparable for the “add” and “combo” vector, excluding that the increased γ-globin levels for the “combo” vector were due to better transduction and vector integration (FIG. 104F). When analyzed in individual progenitor colonies in different mice, the VCN ranged from 1 to 6 copies per cell (FIG. 104G). To demonstrate that [symbol] -globin gene addition and CRISPR cleavage-mediated [symbol] -globin reactivation occurred in long-term repopulating HSCs, bone marrow Lin⁻ cells were transplanted, harvested at week 18 after in vivo HSPC transduction of β-YAC/CD46 mice with the “cut” and “combo” vector, into lethally irradiated C57Bl/6 mice. The ability of transplanted cells to drive the multi-lineage reconstitution in secondary recipients was assessed over a period of 16 weeks. Engraftment rates based on CD46 expression in PBMCs were 95% and remained stable. γ-globin marking of RBCs measured by flow cytometry was also stable and in the range of 70% and 95% at week 16 for the “cut” and “combo” vector, respectively (FIG. 107A). γ-globin expression levels (relative to mouse β-major) measured by HPLC (FIG. 107B) or qRT-PCR (FIG. 107C) were comparable to primary mice. FIG. 107B shows the level of γ-globin protein relative to human β-globin at week 16 after transplantation. FIGS. 107C and 107D show the level of γ-globin protein relative to mouse βₘₐⱼₒᵣ-globin and human β-globin.

[0911] No effect from the genetic manipulation of HSPCs or γ-globin expression from erythroid cells on the cellular composition of the blood, spleen, and bone marrow was observed. FIG. 107E Lineage-positive cell composition in MNCs of blood, spleen, and bone marrow at week 16 after transduction with the “combo” vector (solid symbols) compared to untransduced control mice (unfilled symbols). FIG. 107F shows number of integrated copies of transposon per cell in blood, spleen, and bone marrow.

[0912] In vivo HSPC transduction studies in SCD (Townes) mice. In this model, the murine α-globin genes were replaced with the human α-globin and the murine adult β-globin genes were replaced with human sickle β^{S} and fetal γ-globin genes linked together. The β-globin gene (HBG1) contains 1400 bp of 5′ flanking sequence, which contains the BCL11A target site cleaved by the CRISPR/Cas9. This should lead to reactivation of the β-globin gene. The genome of the Townes model is better characterized than that of another SCD mouse model, the Berkeley model (Hba^{0/0} Hbb^{0/0} Tg(Hu-miniLCRα1^{G}γ^{A}γδβ^{S}), which appears to have more than two copies of the human globin transgenes (Paszty et al., Science 278: 876-878, 1997).

[0913] To make the Townes model suitable for HDAd5/35++ HSPC gene therapy, Townes mice were bred with human CD46 transgenic mice. After three rounds of backcrossing, mice homozygous for human CD46 and the two human (α, β^{S}/ [symbol] ) globin genes were used for experiments (FIG. 108A). Triple homozygous CD46/Townes mice displayed sickle-like erythrocytes (FIG. 108B), severe anemia, 40% reticulocytes in the peripheral blood as well as leukocytosis and thrombocytosis (FIG. 108C). The latter indicates that the disturbance of hematopoiesis extend beyond the erythroid lineage. Another characteristic feature was splenomegaly as a result of extramedullary hematopoiesis (FIG. 108D).

[0914] CD46/Townes mice were mobilized with GCSF/AMD3100 and intravenously injected with the HDAd-combo+HDAd-SB vectors. In vivo selection with O⁶BG/BCNU was started one week after transduction and repeated at weeks 4 and 6 with increasing BCNU doses (5→7.5→10 mg/kg). At baseline, on average, 5% of RBCs were γ-globin positive with a low MFI, indicating an incomplete repression of fetal globin in CD46/Townes mice. After three rounds of in vivo selection, the percentage of -globin-positive RBCs increased and reached >95% by the end of the study (week 13 after in vivo transduction) (FIG. 109A). HPLC analysis of RBC lysates showed γ-globin levels that were 30% of human α-globin or β^{S}-globin (FIG. 109B left panel). Peaks for added γ-globin and re-activated Ay were clearly visible (FIG. 109B right panel). As seen in the CD46/β-YAC model, reactivated [symbol] -globin contributed less than the added [symbol] -globin to total [symbol] -globin levels (FIG. 109C). The low level of baseline [symbol] -globin detected by flow cytometry was below the detection limit of the HPLC. Analysis of globin mRNA in RBCs mirrored the values seen at the protein level be HPLC (FIG. 109D). The γ-globin level after HDAd-combo in vivo HSC gene therapy was higher in the SCD CD46/Townes model than in “healthy” CD46/β-YAC mice.

[0915] Both intended genomic modification were detected in bone marrow samples from week 13. On average 2.5 integrated γ-globin genes were found per cell (FIG. 109E). Target site cleavage efficiency measured by T7E1 assay was comparable, in the range of 25-30% in total bone marrow MNCs, Lin⁻ cells, PBMCs, and splenocytes (FIG. 109F). To show stable genetic modification of CD46/Townes HSPCs, Lin⁻ cells harvested at week 13 after in vivo transduction were transplanted into secondary lethally irradiated C57Bl/6 recipients. γ-globin marking in RBCs was stable over 16 weeks (FIG. 110A) at a level of 30% of adult human globin (FIG. 110B).

[0916] Phenotypic correction of SCD in the mouse model: At week 13 after in vivo HSPC transduction with the combo vector, phenotypic features of Sickle Cell Disease were analyzed in CD46/Townes mice. The average percentage of reticulocytes counted on peripheral blood smears was 5, 39, and 5% for parental (“healthy”) CD46 transgenic mice, CD46/Townes mice before treatment, and CD46/Townes mice at week 13 after treatment, respectively (FIGS. 111A and 111C). In treated mice, the red cell morphology in blood smears of CD46/Townes mice characterized by hypochromia, widely varying sizes/shapes (sickle cells) and cell fragmentation (see FIG. 108B), returned to the normocytic red cell appearance seen in CD46 mice (FIG. 111B). Hematological parameters including RBC, WBC, and platelet counts as well as erythroid features (e.g. hemoglobin and hematocrit) were similar in CD46 and treated CD46/Townes mice (FIG. 111C). Likewise, histological analyses of liver and spleen from treated CD46/Townes mice showed normalization, including absence of parenchymal iron deposition and extramedullary hemopoiesis (FIG. 112A). Spleen size, a measurable characteristic of compensatory hemopoiesis, in treated CD46/Townes mice was comparable to paternal CD46 mice (FIG. 112B).

[0917] Overall, these data indicate a complete cure of Sickle Cell Disease in CD46/Townes mice. It is postulated that this is directly related to the high γ-globin levels (>20%) achieved by a combination of SB100x transposase-mediated γ-globin gene addition (main contribution) and CRISPR/Cas9-triggered reactivation of endogenous γ-globin. Furthermore, these results demonstrate a reduction of Cas9 expression by Flpe/SB100x mediated excision of the CRISPR/Cas9 expression cassette from the HDAd-combo genome, leading to increased safety and percentage of CRISPR-edited HSPCS. Further improvements of this system could include approaches to decrease the amounts of β^{S} in RBCs, for example by the inclusion of Prime Editors that correct the SCD mutation into the HDAd-combo vector.

### Example 4. Production of Ad35 Vectors

[0918] This example describes the production of Ad35 vectors and demonstration of efficacy for transduction of CD34+ cells. Three exemplary Ad35 vectors were produced, with different structures (including different LoxP placement).

[0919] The left end of a representative Ad5/35 helper virus genome is shown in FIG. 113. The sequences shaded in dark grey correspond to the native Ad5 sequence, i.e., the unshaded or light grey highlighted sequences were artificially introduced. The sequences highlighted in light grey are two copies of the (tandemly repeated) loxP sequences. In the presence of “cre recombinase” protein, the nucleotide sequence between the two loxP sequences are deleted (leaving behind one copy of loxP). Because the Ad5 sequence between the loxP sites is essential for packaging the adenoviral DNA into capsids (in the nucleus of the producer cell), this deletion renders the helper adenovirus genome DNA deficient for packaging. Consequently, the efficiency of the deletion process has a direct influence of the level of packaged helper genomic DNA (the undesired helper virus “contamination”). In view of the above, in order to translate the same scheme to adenovirus serotypes other than Ad5, it is desirable to achieve the following: 1. Identify the sequences that are essential for packaging, so that they can be flanked by loxP sequence insertions and deleted in the presence of cre recombinase. Identification of these sequences is not straightforward if there is little similarity in sequences. 2. Determine where in the native DNA sequence the insertion of loxP sequence would have the least effect for the propagation and packaging of helper virus (in the absence of cre recombinase). 3. Determine the spacing between the loxP sequences to allow for efficient deletion of packaging sequences and keeping helper virus packaging to a minimum during the production of helper-dependent adenovirus (i.e., in a cre recombinase-expressing cell line such as the 116 cell line).

[0920] FIG. 114 shows an alignment of representative Ad5 and Ad35 packaging signals (SEQ ID NOs: 49 and 50). The alignment of the left end sequences of Ad5 with Ad35 help in identifying packaging signals. Motifs in the Ad5 sequence that are important for packaging (A1 through AV) are indicated with lines (see also FIG. 1B of Schmid et al., J Virol., 71(5):3375-4, 1997). The location of exemplary loxP insertion sites are indicated by black arrows. These insertions flank AI to AIV and disrupt AV. The additional packaging signal AVI and AVII, as indicated in Schmid et al., have been deleted in the Ad5 helper virus as part of the E1 deletion of this vector.

[0921] FIG. 115 is a schematic illustration of the Ad35 vector pAd35GLN-5E4. This is a first-generation (E1/E3-deleted) Ad35 vector derived from a vectorized Ad35 genome (Holden strain from the ATCC) using a recombineering technique (PMID: 28538186). This vector plasmid was then used to insert loxP sites.

[0922] The packaging site (PS)1 LoxP insertion sites are after nucleotide 178 and 344; this Ad35 vector is exemplified in SEQ ID NO: 286. This LoxP placement is expected to remove AI to AIV. The rest of the packaging signal including AVI and AVII (after 344) has been deleted (as part of the E1 deletion at positions 345 to 3113). The PS2 LoxP insertion sites are after nucleotide 178 and 481; this Ad35 vector is exemplified in SEQ ID NO: 51. Additionally, nucleotides 179 to 365 have been deleted, so AI through AV are not present. The remaining packaging motifs AVI and AVII are removable by cre recombinase during HDAd production. The E1 deletion is from 482 to 3113. The PS3 LoxP insertion sites are after nucleotide 154 and 481; this Ad35 vector is exemplified in SEQ ID NO: 52. The packaging signal structure of these three vectors is provided in FIG. 116.

[0923] Three engineered vectors could be rescued. The percentage of viral genomes with rearranged loxP sites was 50, 20, and 60% for PS1, PS2, and PS3, respectively. Rearrangements occur when the lox P sites critically affected viral replication and gene expression.

[0924] This HDAd35 platform compared to current HDAd5/35 platform is illustrated in FIG. 117. Both vectors contain a CMV-GFP cassette. The Ad35 vector does not contain immunogenic Ad5 capsid protein. These two vectors showed comparable transduction efficiency of CD34+ cells in vitro. Bridging study shows comparable transduction efficiency of CD34+ cells in vitro. Human HSCs, peripheral CD34+ cells from G-CSF mobilized donors were transduced with HDAd35 (produced with Ad35 helper P-2) or a chimeric vector containing the Ad5 capsid with fiber from Ad35, at MOIs 500, 1000, 2000 vp/cell. The percentage of GFP-positive cells was measured 48 hours after adding the virus in three independent experiments.

[0925] The PS2 helper vector was remade (as illustrated in FIG. 118) for use in monkey studies. The following are actions were taken to make this version: deletion of E1 region, a mutant packaging signal flanked by Loxp, mutant packaging sequence, deletion of E3 region (27435430540), replace with Ad5E4orf6, insertion of stuffer DNA flanking copGFP cassette, and introduction of mutation in the knob to make Ad35K++.

[0926] FIG. 119 shows a mutated packaging signal sequence. Residues 1 through 137 are the Ad35 ITR. Text in bold are Swal sites, the Loxp site is italicized, and the mutated packaging signal is underlined. For clarity, these sequences are shown individually in FIG. 119.

[0927] Four Ad35 helper vector packaging signal variants were made (FIG. 120A). The E3 region (27388→30402) was deleted and the CMV-eGFP cassette was located within an E3 deletion, Ad35K++, and eGFP was used instead of copGFP. The LoxP sites in these four packaging signal variants are at the illustrated positions (FIG. 120A). All four helper vectors could be rescued.

[0928] FIG. 1208 is a schematic representation of eight additional packaging signal variants, with the specified the LoxP sites.

[0929] In certain additional helper vector and packaging signal variants, changes were made to the helper vector in FIG. 120A, such as shortening the E3 deletion (27609→30402).

### Example 5. Targeted Integration and High-Level Transgene Expression in AAVS1 Transgenic Mice after Ex Vivo and In Vivo Hematopoietic Stem Cells Transduction with HDAd5/35++ Vectors

[0930] At least some of the information contained in this example was published in Li et al. (Mol Ther., 27(12): 2195-2212, 2019; e-pub Aug. 19, 2019).

[0931] Current hematopoietic stem cell gene therapy in patients use lentivirus vectors for gene delivery (Nadini, EMBO Mol Med, 11, 2019; Wang et al., Genome Res, 17, 1186-1194, 2007). Lentivirus vectors efficiently integrate in the human genome with a strong bias toward actively transcribed genes. This semi-random integration pattern entails a risk of perturbing the expression of neighboring genes, including cancer-related genes. A major goal in the field is therefore to target transgene integration to a preselected site. A number of “safe harbors” for targeted integration into the human genome have been suggested (e.g. AAVS1 and CCR5) (Papapetrou et al., Nat Biotechnol, 29, 73-78, 2011). Among the criteria for a safe harbor site are: (i) distance of >50 kb from 5′ end of any gene, (ii) distance of >300 kb from cancer-related genes, (iii) distance of >300 kb from any microRNA, (iv) outside a gene transcription unit, and (v) outside of ultra-conserved regions. The AAVS1 locus in chromosome 19 is used by wild-type AAV for integration mediated by the virus-encoded protein Rep78 that recognizes a specific motif (RBS) within the AAVS1 site (Muzyczka, Curr Top Microbiol Immunol, 158, 97-129, 1992, Huser et al., PLoS Pathog, 6, e1000985, 2010). Because a large proportion of the human population has encountered AAV, as evidenced by detectable antibodies against some AAV serotypes, but without any discernable pathology, it was concluded that integration into AAVS1 may be safe (Henckaerts et al., Future Virol, 5, 555-574, 2010). Furthermore, this locus contains a DNAse I hypersensitive site and an insulator that maintain an open chromatin conformation in CD34+ and iPS cells (van Rensburg et al., Gene Ther, 20, 201-214, 2013, Lombardo et al., Nat Methods, 8, 861-869, 2011, Ogata et al., J Virol, 77, 9000-9007, 2003). This allows for better access of genome editing tools, and on the other hand should, support high-level transgene expression (van Rensburg et al., Gene Ther, 20, 201-214, 2013, Voigt et al., J Mol Med, 86, 1205-1219, 2008).

[0932] Targeted transgene integration can be achieved via homology-directed repair (HDR) (Lombardo et al., Nat Med, 20, 1101-1103, 2014). Following cleavage by an engineered site-specific nuclease, DNA double-strand breaks are resolved through non-homologous end joining (NHEJ), an error-prone DNA repair pathway that typically leads to variable insertions or deletions (indels), or HDR, which repairs DNA by copying a homologous donor template. Delivery of exogenous DNA flanked by DNA homologous to the genomic sequence around the break site can lead to incorporation of the exogenous sequence in a site-specific manner.

[0933] Current approaches to achieve targeted integration are based on electroporation of HSCs in vitro with endonuclease-encoding mRNA and donor plasmid DNA (Blair et al., J Vis Exp, e53583, 2016, Dreyer et al., Biomaterials, 69, 191-200, 2015; Kuhn et al., Sci Rep, 7, 15195 2017; Li et al., Mol Med Rep, 15, 1313-1318, 2017), integration-deficient lentivirus vectors (IDLV) (Lombardo et al., Nat Med, 20, 1101-1103, 2014; Rio et al., EMBO Mol Med, 6, 835-848, 2014) or rAAV6 vectors (De Ravin et al., Nat Biotechnol, 34:424-429, 2016, Hung et al., Mol Ther, 26, 46-467, 2018; Johnson et al., Sci Rep, 8:12144, 2018). Helper-dependent adenovirus (HDAd5/35++) vectors were developed to deliver designer integrases (Li et al., Blood, 1431, 2915-2928, 2018, Saydaminova et al., Mol Ther Methods Clin Dev, 1, 14057, 2015) and, in this study, donor templates. HDAd5/35++ vectors target human CD46, a receptor that is expressed on primitive HSCs (Richter et al., Blood, 128, 2206-2217, 2016). The ability of HDAd5/35++ vectors to efficiently deliver their genomes into the nucleus of non-dividing cells allows for high amounts of donor DNA, a prerequisite for efficient targeted integration. Because HDAd5/35++ and HDAd35 vectors can carry up to 30 bp of foreign DNA, they can accommodate long stretches of donor sequences that are homologous to the given target site. This should increase the efficacy of gene targeting by homologous recombination, which directly correlates with the length of the homology region (Balamotis et al., Virology, 324, 229-237, 2004, Ohbayashi et al., Proc Nati Acad Sci USA, 102, 13628-13633, 2005, Suzuki et al., Proc Nati Acad Sci USA, 105, 13781-13786, 2008). Because these vectors are easy to produce at high yields and have a strong HSC tropism, they have been employed for in vivo HSC transduction (Richter et al., Blood, 128, 2206-2217, 2016). The central idea of the approach is to mobilize HSCs from the bone marrow using G-CSF/AMD3100, and while they circulate at high numbers in the periphery, transduce them with intravenously injected HDAd5/35++ vectors. Transduced cells return to the bone marrow where they persist long-term. The safety and efficacy of the approach was previously demonstrated in CD46 transgenic mouse models for hemoglobinopathies either by CRISPR/Cas9-mediated reactivation of endogenous fetal globin (Li et al., Blood, 1431, 2915-2928, 2018) or by fetal globin gene addition using a hyperactive Sleeping Beauty Transposase (SB100x) that mediates efficient random transient integration (Wang et al., J Clin Invest, 129, 598-615, 2019). While SB100x-mediated transgene integration is theoretically safer than the quasi-random integration of lentivirus vectors, it still raises concerns with regards to transgene silencing, undesired effects on neighboring genes, and genomic rearrangements. The goal of this study was therefore to modify the HDAd5/35++-based in vivo HSC transduction approach for targeted integration into AAVS1.

[0934] A sequence homologous to the human AAVS1 locus is absent in rodents (Samulski et al., EMBO J, 10, 3941-3950, 1991). Two transgenic rodent models have been reported previously, which contain either a 3.5-kb fragment of the AAVS1 locus (7 copies head-to-tail in rats) in the rat or mouse genome (X-chromosome) (Rizzuto et al., J Virol, 73, 2517-2526, 1999). A study showed that the open chromatin structure of AAVS1 is maintained in transgenic mice (Young et al., J Virol, 74, 3953-3966, 2000). Jackson Laboratories distributes AAVS1 transgenic mice (Bakowska et al., Gene Ther, 10, 1691-1702, 2003). Jackson Labs' website states that these mice contain five copies of an 8.2 kb human AAVS1 locus fragment inserted into a single genomic site. To make AAVS1 transgenic mice suitable for transduction with HDAd5/35++ vectors, they were crossed with mice that were transgenic for the human CD46 locus (Kemper et al., Clin Exp Immunol, 124, 180-189, 2001). All animal studies were performed with AAVS1/CD46+/+ mice.

[0935] Materials and Methods.

[0936] Cells: CD34⁺ cells from G-CSF-mobilized adult donors were obtained. Cells were recovered from frozen stocks and incubated overnight in StemSpan H3000 (STEMCELL Technologies, Vancouver, Canada) with penicillin/streptomycin, Flt3 ligand (F1t3L, 25 ng/ml), interleukin 3 (10 ng/ml), thrombopoietin (TPO) (2 ng/ml), and stem cell factor (SCF) (25 ng/ml). Cells were transduced with HDAd vectors at a MOI of 2000 vp/cell and analyzed as indicated. HUDEP-2 cells. HUDEP-2 cells (Kurita et al., PLoS One, 8, e59890, 2013) were also obtained. HUDEP-2 cells were cultured in the presence of SCF, EPO, Doxycycline and Dexamethasone as previously described (Canver et al., Nature, 527, 192-197, 2015). The cells were transduced with the HDAd vectors at a MOI of 500-1000 vp/cell and analyzed as indicated.

[0937] HDAd5/35++ vectors: HDAd-SB, HDAd-IR-GFP/mgmt, and HDAd-IR-γ-globin/mgmt have been described before (Li et al., Mol Ther Methods Clin Dev, 9, 142-152, 2018, Wang et al., Mol Ther Methods Clin Dev, 8, 52-64, 2018). For the cloning of the HDAd-CRISPR vector, sgRNA (SEQ ID NO: 207) (Mali et al., Science, 339, 823-826, 2013) targeting the human AAVS1 locus was synthesized, annealed and inserted into the Bbsl site of pSPgRNA (Addgene, Cambridge, Mass.), generating pSP-sgAAVS1. A Cas9 coding sequence amplified from pLentiCRISPRv2 (Addgene), U6sgAAVS1 fragments released by BamHI digestion of pSP-sgAAVS1, and a previously described microRNA targeting region (miR-183/218) (Saydaminova et al., Mol Ther Methods Clin Dev, 1, 14057, 2015) were sequentially cloned into the EcoRV-NotI, BamHI and NotI sites of pBS-T-EF1α (Saydaminova et al., Mol Ther Methods Clin Dev, 1, 14057, 2015), forming pBST-sgAAVS1-miR. To obtain the recombinant adenoviral plasmids, an 8 kb cassette starting from the U6 promoter to the SV40 polyA signal sequence was amplified from pBST-sgAAVS1-miR and ligated with NheI-XmaI digested pHCA (Sandig et al., Proc Natl Acad Sci USA, 97, 1002-1007, 2000) by Gibson assembly (New England Biolabs), generating the corresponding pHCA-sgAAVS1-miR plasmid.

[0938] For the construction of the HDAd-GFP-donor vector, two 0.8 kb homology arms (HA) immediately flanking the AAVS1 CRISPR cutting site were synthesized as gBlocks (IDT, San Jose, Calif.). One 23 bp sgAAVS1 with PAM sequence was included upstream of the 5′HA and downstream of 3′HA, respectively, to mediate the release of the donor cassette. A EF1α-mgmt-2A-GFP-pA fragment was synthesized by GenScript (Nanjing, China), and ligated with the two 5′HAs by overlap PCR, forming sgAAVS1-5′HA-Ef1α-mgmt-2A-GFP-pA-3′HA-sgAAVS1 which was subsequently inserted into the XmaI site of pHCA (Sandig et al., Proc Natl Acad Sci USA, 97, 1002-1007, 2000), generating GFP donor vector pHCA-AAVSI-GFP-mgmt.

[0939] The cloning of the HDAd-globin-donor vector involved 3 steps. Step 1) The 11.8 kb LCR-globin-mgmt cassette was released from pHM5-FR-IR-LCR-globin-mgmt (Li et al., Mol Ther Methods Clin Dev, 9, 142-152, 2018) by EcoRV-KpnI digestion and ligated with a 2.8 kb plasmid backbone amplified from pBS-Z (Saydaminova et al., Mol Ther Methods Clin Dev, 1, 14057, 2015), resulting in pBS-LCR-globin-mgmt. Two 1.8 kb HAs immediately adjacent to the AAVS1 CRISPR cutting site were PCR amplified from genomic DNA isolated from bone marrow cells of AAVS1-tg mice using primers containing the 23 bp sgAAVS1 with PAM sequence. The 5′ and 3′ side HAs were sequentially inserted into the EcoRV and KpnI sites, respectively, of pBS-LCR-globin-mgmt, generating pBS-AAVS1-globin-mgmt. Step 2) The nt1588-12121 region of pHCA was deleted by EcoRI digestion and self-ligation, generating pHCAS1. The original PacI site in pHCAS1 was destroyed by inserting two annealed oligo sequences. A new PacI cloning site was created at a BstBI site, getting pHCAS1-MCS. This cloning site was designed in such a way that two 15 bp homologous regions are exposed upon PacI digestion. The size of pHCAS1-MCS was further reduced by removing the 1.5 kb NheI fragment, resulting in pHCAS1S-MCS. Step 3) Following PacI digestion of the two final constructs from the above two steps, the products were recombined by Gibson Assembly, generating the globin donor vector pHCA-AAVS1-globin-mgmt.

[0940] For the production of HDAd5/35++ vectors, corresponding plasmids were linearized with PmeI and rescued in 116 cells (Palmer et al., Mol Ther, 8, 846-852, 2003) with Ad5/35++-Acr helper vector (Li et al., 2018. Blood, 1431, 2915-2928) as described in detail elsewhere (Palmer et al., Mol Ther, 8, 846-852, 2003). Helper virus contamination levels were found to be <0.05%. Titers were 6-12×10¹² vp/ml. All HDAd vectors used in this study contain chimeric fibers composed of the Ad5 fiber tail, the Ad35 fiber shaft, and the affinity-enhanced Ad35++fiber knob (Wang et al., J Virol, 82, 10567-10579, 2008).

[0941] Mismatch sensitive nuclease assay T7E1 assay. Genomic DNA was isolated as previously described (Miller et al., Nat Biotechnol, 25, 778-785, 2007). Genomic segments encompassing the AAVS1 target site were amplified by KOD Hot Start DNA Polymerase (MilliporeSigma, Burlington, Mass.) using the following primers: AAVS1 forward (SEQ ID NO: 208); reverse (SEQ ID NO: 209). PCR products were hybridized and treated with 2.5 Units of T7E1 (NEB) for 20 minutes at 37° C. Digested PCR products were resolved by 6% TBE PAGE (Bio-Rad) and stained with ethidium bromide. Band intensity was analyzed using ImageJ software. % cleavage=(1-sqrt(parental band/(parental band+cleaved bands)))×100%

[0942] Next generation sequencing: For deep sequencing of insertion/deletions (indels), a 250-bp region surrounding the predicted AAVS1 cleavage site was amplified and sequenced the products using an Illumina system. Genomic DNA was isolated as previously described (Saydaminova et al., Mol Ther Methods Clin Dev, 1, 14057, 2015). A 249 bp genomic region encompassing the AAVS1 target site was amplified using the following primers: AAVS1 forward (SEQ ID NO: 210); reverse (SEQ ID NO: 211). After cleaning-up the amplicon using AMPure XP Beads (Beckman Coulter, Indianapolis, Ind.), dA-tailing was performed using Klenow fragment. Illumina-compatible adaptors were ligated with the product by T4 ligase (New England Biolabs). A unique barcode sequence was introduced by PCR to allow sequencing multiple samples on the same sequencing run. Each step was followed by purification with AMPure XP Beads. The final libraries were quantified by Qubit (Invitrogen) and tested on an Agilent 2100 Bioanalyzer to determine average size of the amplicons. The amplicons were pooled at equal molarity and deep sequenced on an Illumina MiSeq system. 10⁵ reads per amplicon were generated to adequately probe the types of mutations. Sequencing data were aligned to the AAVS1 reference sequence using the Cas-Analyzer online tool (available at rgenome.net/cas-analyzer/#!) (Park et al., Bioinformatics, 33, 286-288, 2017, a JavaScript-based implementation for NGS data analysis.

[0943] Flow cytometry: Cells were resuspended at 1×10⁶ cells/100 μL in FACS buffer (PBS supplemented with 1% heat-inactivated FBS) and incubated with FcR blocking reagent (Miltenyi Biotech, Auburn Calif.) for ten minutes on ice. Next the staining antibody solution was added in 100 μL per 10⁶ cells and incubated on ice for 30 minutes in the dark. After incubation, cells were washed once in FACS buffer. For secondary staining the staining step was repeated with a secondary staining solution. After the wash, cells were resuspended in FACS buffer and analyzed using a LSRII flow cytometer (BD Biosciences, San Jose, Calif.). Debris was excluded using a forward scatter-area and sideward scatter-area gate. Single cells were then gated using a forward scatter-height and forward scatter-width gate. Flow cytometry data were then analyzed using FlowJo (version 10.0.8, FlowJo, LLC). For flow analysis of LSK cells, cells were stained with biotin-conjugated lineage detection cocktail (Miltenyi Biotec, San Diego, Calif.) and antibodies against c-Kit and Sca-1 as well as APC-conjugated streptavidin. Other antibodies from eBioscience (San Diego, Calif.) included anti-mouse LY-6A/E (Sca-1)-PE-Cyanine7 (clone D7), anti-mouse CD117 (c-Kit)-PE (Clone 2B8), anti-mouse CD3-APC (clone 17A2), anti-mouse CD19-PE-Cyanine7 (clone eBio1D3), and anti-mouse Ly-66 (Gr-1)-PE, (clone RB6-8C5). Other antibodies from Miltenyi Biotec included anti-human CD46-APC (clone: REA312). Anti-mouse Ter-119-APC (clone: Ter-119) was from BioLegend (San Diego, Calif.).

[0944] Intracellular staining of human γ-globin was performed using PE-conjugated anti-human γ-globin antibody from Santa Cruz (clone 51.7). The Fix & Perm cell permeabilization kit from Invitrogen was used according to manufacturer's instructions.

[0945] Real-time reverse transcription PCR: Total RNA was extracted from 50-100 μL blood by using TRIzol™ reagent (Thermo Fisher Scientific) following the manufacture's phenol-chloroform extraction method, then reverse transcribed to generate cDNA using Quantitect reverse transcription kit from Qiagen. Potential genomic DNA contamination was eliminated by treatment of the RNA samples with gDNA wipe-out reagents provided in the kit. Comparative real-time PCR was performed using Power SYBR Green PCR master mix (Applied Biosystems) and ran on a StepOnePlus real-time PCR system (Applied Biosystems). The following primer pairs were used: mouse RPL10 (house-keeping) forward (SEQ ID NO: 189), and reverse (SEQ ID NO: 190); human γ-globin forward (SEQ ID NO: 214), and reverse (SEQ ID NO: 215); mouse β-major globin forward (SEQ ID NO: 193), and reverse (SEQ ID NO: 217).

[0946] Globin HPLC: Individual globin chain levels were quantified on a Shimadzu Prominence instrument with an SPD-10AV diode array detector and a LC-10AT binary pump (Shimadzu, Kyoto, Japan). A 38%-58% gradient mixture of 0.1% trifluoroacetic acid in water/acetonitrile was applied at a rate of 1 mL/min using a Vydac C4 reversed-phase column (Hichrom, UK).

[0947] Colony forming unit assay. 2500 of Lin− cells were plated in triplicates in ColonyGEL 1202 mouse complete medium (ReachBio, Seattle Wash.) and incubated for 12 days at 37° C. in 5% CO₂ and maximum humidity. Colonies were enumerated using a Leica MS 5 dissection microscope (Leica Microsystems). For colonies derived from HDAd-GFP-donor-transduced mice, GFP positive colonies were counted, picked and analyzed.

[0948] Measurement of vector copy number Total DNA from bone marrow cells or single colonies was extracted by PureLink Genomic DNA Mini Kit (Invitrogen). Viral DNA extracted from HDAd-GFP-donor or HDAd-globin-donor was serially diluted and served as standard curve. qPCR was conducted duplicate using the power SYBR Green PCR master mix on a StepOnePlus real-time PCR system (Applied Biosystems). 5 ng DNA was used for a 10 μL reaction. The following primer pairs were used: GFP forward (SEQ ID NO: 218), and reverse (SEQ ID NO: 219); and mgmt forward (SEQ ID NO: 220), and reverse (SEQ ID NO: 221). Human γ-globin primers were described in the paragraph of Real-time reverse transcription PCR.

[0949] Localization of AAVS1 locus in AAVS1 transgenic mice. TLA library was prepared as described previously (de Vree et al., Nat Biotechnol, 32, 1019-1025, 2014). Briefly, formaldehyde crosslinked DNA from total bone marrow cells were digested with NlaIII. After ligation and reverse crosslinking, DNA was purified. This product was further digested with NspI and ligated to obtain circular chimeric DNA of 2 kb. Chimeric DNA was PCR amplified using AAVS1 specific TLA primers: forward (SEQ ID NO: 222), and reverse (SEQ ID NO: 223). TLA libraries from PCR amplified product was prepared using Illumina Nextera XT NGS kit according to manufacturer's protocol. Paired end sequencing was performed on NovaSeq. TLA protocol leads to reshuffling of DNA, thus reads were aligned using split-read aware aligner BWA (Li et al., Bioinformatics, 26, 589-595, 2010) using settings: bwasw-b 7 as suggested previously (see online at github.com/Cergentis/Cergentis_common) (Vain-Hom et al., 2017. Nucleic Acids Res, 45, e62). These aligned bam files were converted to RPKM normalized bigwig files using deepTools (Ramirez et al., Nucleic Acids Res, 42, W187-191, 2014). Genome wide distribution was visualized using WashU epigenome browser (Zhou et al., Nat Methods, 8, 989-990, 2011).

[0950] Southern Blot. Genomic DNA from mouse bone marrow was digested with either EcoRl or Blp1 and subjected to Southern blot with either an AAVS1- or GFP-specific probe labelled with ³²P using the Prime-It RmT Random Primer labeling kit (Agilent Technologies). Non-incorporated ³²P dCTP was removed by centrifugation through MicroSpin G25 columns (GE Healthcare). Hybridization was performed in PerfectHyb Plus hybridization buffer (Sigma). Blots were exposed to Amersham Hybond-XL films (GE Healthcare).

[0951] Inverse PCR: Junctions in total bone marrow cells, single colonies, HUDEP-2 cell mixture or clones were analyzed by inverse PCR as described elsewhere with modifications (Wang et al., J Virol, 79, 10999-11013, 2005). Briefly, genomic DNA was isolated by incubating with genomic DNA lysis buffer (100 mM Tris-CI (pH 8.0), 50 mM EDTA, 1% (w/v) SDS, and 400 μg/mL Proteinase K) at 55° C. overnight with shaking, followed by Phenol-Chloroform extraction, precipitation with isopropanol, and wash with 70% ethanol. The DNA samples were dissolved in 10 mM Tris/HCL buffer (pH 8.5). 5 μg of DNA was digested with 30 U NcoI in 50 μL reaction at 37° C. for 5 hours. After heat-inactivation and clean-up, the digested DNA was treated with 2.5 μL T4 ligase (New England Biolabs, M0202L) in 500 μL reaction buffer at 16° C. overnight for intramolecular ligation. Following heat-inactivation and clean-up, the re-ligated product was used for inverse PCR using KOD Hot Start DNA Polymerase. The following primers were used: EF1a, forward (SEQ ID NO: 224), and reverse (SEQ ID NO: 225); pA forward (SEQ ID NO: 226), and reverse (SEQ ID NO: 227); HS4 forward (SEQ ID NO: 228); and reverse (SEQ ID NO: 229). The Ef1a, and pA primer pairs were used for analyzing 5′ and 3′ junctions of GFP donor vector-treated samples, respectively. The HS4 and EF1α primer pairs were used for analyzing 5′ and 3′ junctions of globin donor vector-treated samples, respectively. PCR amplicons were gel purified, cloned, sequenced and aligned to identify the integration sites.

[0952] In-Out PCR: Genomic DNA was extracted as described in the section of Inverse PCR. 5 ng genomic DNA was directly used as template for In-Out PCR by KOD Hot Start DNA Polymerase in a 25 μl of reaction. The following PCR program was used: 94° C. 2 min; 5 cycles of 98° C. 10 sec, 66° C. 30 sec and 68° C. 1.5 min; 5 cycles of 98° C. 10 sec, 63° C. 30 sec and 68° C. 1.5 min; 15 cycles of 98° C. 10 sec, 60° C. 30 sec and 68° C. 1.5 min; 68° C. 5 min. Primers used are In-Out P1 (SEQ ID NO: 230), In-Out P2 (SEQ ID NO: 231), and In-Out P3 (SEQ ID NO: 232). The products were resolved in a 1% Agarose gel. One single 1.6 kb band indicates biallelic targeted integration; one 1.6 kb plus one 2.0 kb band indicates monoallelic targeted integration; one single 2.0 kb band indicates potential off-target integration.

[0953] In silico prediction of off-target cleavage sites: Off-target sites of the AAVS1 guide sequence in human or mouse genome were predicted using the online tool: available at sanger.ac.uk/htgt/wge/find_off_targets_by_seq.

[0954] Animal studies: All experiments were conducted with approval from the controlling Institutional Review Board and IACUC. Mice were housed in specific-pathogen-free facilities. AAVS1 transgenic mice (C3; B6-Tg(AAVS1)A1Xob/J) (The Jackson Laboratory) were recovered from cryopreserved embryos of mice as described in Bakowska et al. (Gene Ther, 10, 1691-1702, 2003). Mice are hemizygous for the human AAVS1 locus. AAVS1 transgenic mice were crossed with human CD46+/+ mice to obtain AAVS1^{+/-}/CD46^{+/-} mice for ex vivo studies and AAVS1^{+/-}/CD46+/+ mice for in vivo HSC transduction studies. The following primers were used for genotyping of CD46 mice: forward (SEQ ID NO: 233), and reverse (SEQ ID NO: 234). Mice homozygous or heterozygous for CD46 were identified by different intensity of CD46 expression on PBMCs detected by flow cytometry. Genotyping of AAVS1 transgene was performed by PCR according to Jackson Labs' recommended protocol.

[0955] Bone marrow Lin⁻ cell transplantation: Recipients were female C57BL/6 mice, 6-8 weeks old. On the day of transplantation, recipient mice were irradiated with 1000 Rad. Four hours after irradiation 1×10⁶ Lin⁻ cells were injected intravenously through the tail vein. This protocol was used for transplantation of ex vivo transduction Lin⁻ cells and for transplantation into secondary recipients.

[0956] HSC mobilization and in vivo transduction: This procedure was described previously (Richter et al., Blood, 128, 2206-2217, 2016). Briefly, HSCs were mobilized in mice by s.c. injections of human recombinant G-CSF (5 μg/mouse/day, 4 days) (Amgen Thousand Oaks, Calif.) followed by an s.c. injection of AMD3100 (5 mg/kg) (Sigma-Aldrich) on day 5. In addition, animals received Dexamethasone (10 mg/kg) i.p. 16 h and 2 h before virus injection. Thirty and 60 minutes after AMD3100, animals were intravenously injected with HDAd-CRISPR and HDAd-GFP-donor or HDAd-globin-donor through the retro-orbital plexus with a dose of 4×10¹⁰ vp for each virus per injection. Four weeks later, mice were injected with O⁶-BG (15 mg/kg, IP) two times, 30 minutes apart. One hour after the second injection of O⁶-BG, mice were injected with BCNU (5 mg/kg, IP). The BCNU dose was increased in the second cycle to 10 mg/kg. Both BCNU and O⁶-BG were from Sigma-Aldrich.

[0957] Statistical analyses: For comparisons of multiple groups, one-way and two-way analysis of variance (ANOVA) with Bonferroni post-testing for multiple comparisons was employed. Statistical analysis was performed using Graph Pad Prism version 6.01 (GraphPad Software Inc., La Jolla, Calif.).

[0958] Results

[0959] Design of HDAd-CRISPR and HDAd-donor vectors. A HDAd5/35++ vector expressing a CRISPR/Cas9 was created. The vector is capable of creating ds DNA breaks within the AAVS1 locus (FIG. 55A). Previous studies demonstrated that site-specific integration into this locus allowed for robust transgene expression without side-effects in primary human cells (Lombadro et al., Nat Methods, 8, 861-869, 2011). To test the activity of the corresponding HDAd-CRISPR vector human CD34+ cells were transduced, a cell fraction that is enriched for HSCs. AAVS1 site-specific cleavage at day 3 after infection with a frequency of 42% was demonstrated by mismatch sensitive nuclease assay T7E1 assay (FIG. 55B). For deep sequencing of HDAd-CRISPR insertion/deletions (indels), PCR amplification was performed on a 250-bp region surrounding the predicted AAVS1 cleavage site and sequenced the products using an Illumina system (FIG. 55C). 80% of indels were deletions ranging from 1 to 20 bp and only 10% were 1 to 2 bp micro-insertions.

[0960] A HDAd5/35++ vector was used as the donor vector. The first HDAd-donor vector contained an expression cassette for GFP and mgmt^{P140K} flanked on both sides by 0.8 kb long regions that are homologous to areas immediately adjacent to the CRISPR/Cas9 target site (FIG. 55D). Linear double-stranded adenoviral genomes are covalently linked with the virus produced “terminal protein—TP” when they enter cells and are translocated to the nucleus (Shenk, Fields Virology, 2:2111-2148, 1996). This same is the case for HDAd5/35++genomes, where the TP is helper virus derived. It is thought that the absence of free DNA ends in the donor greatly diminished HDR (Cristea et al., Biotechnol Bioeng, 110, 871-880, 2013). The sgRNA target sites for the AAVS1 CRISPR were incorporated into the donor vector flanking the donor transgene cassette (FIG. 55D). Co-infection of HDAd-CRISPR and HDAd-GFP-donor should therefore simultaneously create dsDNA breaks in the chromosomal AAVS1 target site and release the donor cassette from the incoming HDAd-donor genome inside the nucleus. IA HDAd-CRISPR-mediated release of the donor cassette from a co-infected HDAd-GFP-donor vector with an efficacy of 13.2 and 18.1% in CD34+ cells at day 2 after infection at a total MOI of 1000 and 2000 vp/cell was demonstrated, respectively (FIG. 55E). This finding also indicates that CRISPR/Cas9 is capable of cleaving double-stranded linear adenoviral DNA, which has implications for anti-viral therapies.

[0961] Targeted integration in vitro. First, the HDAd-CRISPR+HDAd-donor vector system was tested for targeted integration in vitro in direct comparison to the SB100x vector system that mediates random integration (FIG. 56A). HUDEP-2 cells, a human erythroid progenitor cell was used. This cell line is diploid and allows for the expansion of single colonies, features that facilitate integration site analysis. GFP flow cytometry performed at day 2 after transduction of HUDEP-2 cells demonstrated similar percentages of GFP-positive cells for the SB100x-mediated and targeted integration systems indicating similar transduction rates (FIG. 56B, upper panel). GFP expression at day 2 is likely to originate from episomal genomes because transduction with HDAd-GFP-donor alone resulted in similar GFP marking. After culturing transduced cells for 21 days, due cell proliferation, episomal genomes disappeared as the absence of GFP expression in the HDAd-GFP-donor alone setting indicates. At day 21, 4.52% and 1.82% of cells were GFP-positive for the SB100x-mediated and targeted integration system, respectively (FIG. 56B, lower panel). This suggests that the SB100x system confers higher stable transduction rates. However, the level of GFP expression, reflected by the Mean Fluorescence Intensity (MFI), was higher in cells transduced with HDAd-CRISPR+HDAd-GFP-donor both in the cell population at day 21 (FIG. 56C) and at the single clone level (FIG. 56D). Vector integration analysis was performed in single clones. Because of the long homology regions flanking the transgene cassette, it was not possible to employ commonly used tools for vector integration site analysis (e.g. LAM-PCR). To demonstrate the presence of vector-cellular DNA junctions, an inverse PCR (iPCR) method was used that involves the endonuclease cleavage of genomic DNA into 4 kb fragments, their circularization, and subsequent PCR with transgene specific primers (Wang et al., J Virol, 79, 10999-11013, 2005). Results showed that all tested 36 colonies derived from HDAd-CRISPR+HDAd-GFP-donor transduced HUDEP-2 cells had transgenes integrated into the AAVS1 site (FIG. 57A). This is in line with the homogeneous high level of transgene expression in clones with targeted integration. In-/out-PCR with AAVS1 and transgene specific primers revealed that integration in 3 out of 36 colonies occurred in both alleles; 31 out of 36 had monoallelic integrations, and 2 apparently had concatemeric integrants (FIG. 57B). In contrast, SB100x-mediated random integration with no preferential targeting of a specific locus (Wang et al., 2019. J Clin Invest, 129, 598-615, Boehme et al., Mol Ther Nucleic Acids, 5, e337, 2016) resulted in varying levels of gene silencing (FIG. 56E). Similar levels of vector copy number were detected in clones with SB100x and targeted integration (FIG. 56F).

[0962] In summary, the in vitro studies showed that the HDAd-CRISPR+HDAd-GFP-donor system conferred targeted integration at a high efficiency and resulted in higher GFP expression levels than the SB100x mediated system. The efficacy of stable integration was 40% lower for the targeted system.

[0963] Ex vivo transduction of AAVS1/CD46 HSCs with HDAd-CRISPR+HDAd-GFP-donor and subsequent transplantation into lethally irradiated recipients. Next, the targeted integration system was tested in HSCs from AAVS1/CD46tg mice. The target site cleavage frequency after ex vivo transduction of lineage-negative (Lin⁻) cells, a bone marrow cell fraction enriched for HSCs, was 25% after transduction with the HDAd-CRISPR vector at a MOI of 1000 vp/cell (FIG. 58A). The percentage of insertions/deletions is shown in FIG. 58B at 0% and 50% cleavage. Exemplary sequences are shown in FIG. 58C. AAVS1/CD46 Lin⁻ cells transduced ex vivo with HDAd-CRISPR alone, HDAd-GFP-donor alone, and the combination of both were transplanted into lethally irradiated C57Bl/6 mice, which were then followed for 16 weeks (FIG. 59A). Engraftment of transplanted cells based on human CD46 expression on PBMCs was measured by percent of CD46+ PBMCs at indicated time points. Transduced donor cells expressed CD46 (FIG. 60B), while recipient C57Bl/6 mice did not. Percentage of CD46+ cells in PBMCs (blood), spleen, and bone are shown in FIGS. 60C and 60D. Expression of a GFP marker was also analyzed in colonies and pooled colony cells.

[0964] Donor cell engraftment rates were comparable for all three settings (FIG. 60) suggesting that the genomic modification introduced in HSCs by the HDAd-CRISPR and HDAd-CRISPR+HDAd-GFP-donor vector had no detrimental effects on HSC biology, specifically on the multilineage repopulation of lethally irradiated recipients. GFP marking rates reaching up to 100% appeared in PBMCs after three rounds of O⁶BG/BCNU selection of HSC/progenitors that stably expressed transgenes (FIGS. 59B, 59C). Before selection (4 weeks after transplantation), the percentage of GFP+PBMCs was 1.1%, indicating that targeted integration is a rare event. GFP+PBMCs were less than 0.2% on average in mice that were transplanted with Lin⁻ cells transduced with HDAd-GFP-donor only. This points toward the necessity of CRISPR/Cas9-mediated dsDNA breaks to achieve stable transgene expression. Mice analyzed at week 16 after transplantation showed GFP marking in all lineages analyzed in bone marrow, spleen, and PBMCs (FIG. 59D). GFP marking rates were maintained for 16 weeks in secondary transplant recipients demonstrating that primitive HSCs were genetically modified with the HDAd-CRISPR+HDAd-GFP-donor vector system (FIG. 61A), including in blood, spleen, and bone marrow (FIGS. 61B, 61C), and as shown for colonies and pooled colony cells (FIG. 61D). Percent of human CD46+ cells and percentage in blood, spleen, and bone marrow are further shown in FIGS. 61E and 61F.

[0965] In vivo HSC transduction of AAVS1/CD46tg mice with HDAd-CRISPR+HDAd-GFP-donor. For in vivo HSC transduction of AAVS1/CD46-transgenic mice, HSCs were mobilized from the bone marrow into the peripheral blood stream by subcutaneous injections of G-CSF/AMD3100 and transduced in vivo by intravenously delivered HDAd-CRISPR+HDAd-GFP-donor vectors (FIG. 62A). After in vivo selection with three cycles of O⁶BG/BCNU, 60% of mice showed GFP expression in PBMCs ranging from 35 to 95% GFP+PBMCs in individual animals (FIG. 62B). At week 16 after in vivo transduction, similar marking was seen in mononuclear cells in blood, spleen and bone marrow (FIG. 62C). GFP marking was seen in CD3+, CD19+, and Gr-1+lineage cells in the blood, spleen and bone marrow (FIG. 62D). In the bone marrow of “responders”, more than 50% of LSK cells (a fraction that is enriched for HSCs) were GFP-positive (FIG. 62D, last group). This was also reflected by a functional assay for HSCs, the ability to form progenitor colonies (FIG. 62E). Furthermore, the transduction of primitive, long-term repopulating HSCs was shown in secondary recipients (see percentage of GFP+PBMCs at indicated time points (FIG. 63A), percentage of GFP+ cells in blood, spleen, and bone marrow (FIGS. 63B, 63C); percentage of human CD46+ cells (FIG. 63D), and percentage in blood, spleen, and bone marrow (FIG. 63E)). The in vivo HSC transduction/selection procedure had no negative influence on bone marrow cell composition and hematopoiesis (FIG. 62F).

[0966] Ex vivo and in vivo HSC transduction the HDAd-CRISPR and HDAd-globin-donor vector. While the studies with the HDAd-GFP-donor vector suggest stable HSC transduction in the majority of animals, a higher rate of responders would be desirable. This would require increasing the efficacy of HDR-mediated integration, which can be achieved by increasing the length of the homology arms (Balamotis et al., Virology, 324, 229-237, 2004, Ohbayashi et al., Proc Natl Acad Sci USA, 102, 13628-13633, 2005, Suzuki et al., Proc Natl Acad Sci USA, 105, 13781-13786, 2008). A new HDAd-donor vector with 1.8 kb regions that were homologous to AAVS1 genomic sequences surrounding the CRISPR/Cas9 cleavage site were generated (FIG. 64A). For application in gene therapy of hemoglobinopathies, the human γ-globin gene (HBG1) under control of a mini γ-globin LCR was used. The HDAd-globin-donor vector were both tested in the ex vivo and in vivo HSC transduction protocols. In the ex vivo transduction setting (FIG. 64B), it was observed that all mice responded mice expressing γ-globin in 80% of peripheral red blood cells (RBCs) (FIG. 64C). The percentage of γ-globin-positive erythroid (Ter119+) cells in the blood and bone marrow was significantly higher than that of non-erythroid (Ter119⁻) cells (FIG. 64D). The same was the case for the γ-globin MFI (FIG. 64E). This suggests that the mini-LCR confers preferential expression in erythroid cells. At week 16, the level of γ-globin was 20.52(+/−5.66)% of that of adult mouse γ-globin measured by HPLC (FIG. 64F) and 22.33(+/−6.21)% by qRT-PCR (FIG. 64G). In a previous study, performed under the same regimen with the SB100x-system, γ-globin expression levels were 15.74(+/−2.69)% by HPLC and 15.40(+/−9.21)% by qRT-PCR (Li et al., Mol Ther Methods Clin Dev, 9, 142-152, 2018). This implies that the level of γ-globin expression is higher for the targeted integration system compared to the SB100x system. In fact, for the targeted integration system it would be in the range of curative levels, which is thought to be 20% γ-globin of adult globin for patients with β₀/β₀ thalassemia or sickle cell disease (Wang et al., J Clin Invest, 129, 598-615, 2019). In agreement with previous studies (Wang et al., J Clin Invest, 129, 598-615, 2019), two integrated vector copies per genome at week 16 were measured in single Lin⁻ cell-derived colonies on average (FIG. 64H). Ex vivo HSC transduction of Lin⁻ cells did not affect their ability for multilineage engraftment and complete hematopoietic reconstitution in lethally irradiated recipients (see percentage of human CD46+ cells at indicated time points (FIG. 65A), percentage in blood, spleen, and bone marrow (FIG. 65B)). Analysis of secondary HSC transplant recipients showed that ex vivo transduction with the HDAd-CRISPR+HDAd-globin-donor vector followed by in vivo selection did not affect the pool of HSCs capable of long-term repopulation (see percentage of human γ-globin⁺ cells in RBCs (FIG. 66A), percentage of human CD46+ cells (FIG. 66B), and percentage in blood and bone marrow (FIG. 66C)).

[0967] In the in vivo HSC transduction studies with the HDAd-CRISPR+HDAd-globin-donor vector (FIG. 67A), after in vivo selection, 4 out of 5 mice showed stable γ-globin expression in RBCs, ranging from 40 to 97% γ-globin⁺ RBCs in individual mice (FIG. 67B). γ-globin expression was found preferentially in erythroid cells (FIGS. 67C, 67D). The γ-globin expression levels in RBCs were 23.97(+/−7.22)% by HPLC (FIGS. 67E, 67H) and 24.53(+/−7.34)% by qRT-PCR (FIG. 67F) of that of adult mouse γ-globin. The vector copy number per cell ranged from 1.5 to 2.5 in individual mice (FIG. 67G). In the same in vivo HSC transduction/selection setting, using the SB100x based γ-globin vectors, γ-globin levels were 10.5(+/−3.1)% by HPLC and 12.17(+/−3.38)% by qRT-PCR with an average of 2 integrated vector copies per genome (Wang et al., J Clin Invest, 129, 598-615, 2019). Transplantation of bone marrow Lin⁻ cells harvested at week 16 after in vivo transduction with HDAd-CRISPR+HDAd-globin-donor into lethally irradiated recipients showed 100% engraftment and stable γ-globin expression in RBCs over 16 weeks with an average level of 24% γ- of adult β-globin (see percentage of human CD46+ cells in PBMCs at indicated time points (FIG. 68A); percentage of γ-globin⁺ cells in peripheral blood at indicated time points (FIG. 68B); human γ-globin as a percentage of mouse β-major protein (FIG. 68C); and percentage in blood, spleen, and bone marrow (FIG. 68D)).

[0968] In summary, the HSC transduction studies with HDAd-CRISPR+HDAd-globin-donor resulted in stable γ-globin expression at levels that are significantly higher than those achieved in previous studies with the SB100x-based system.

[0969] Localization of the AAVS1 locus in AAVS transgenic mice. Inverse PCR (iPCR) for integration site analysis requires the knowledge of the AAVS1 locus localization in the genome of AAVS1/CD46-transgenic mice. To determine this, a targeted locus amplification (TLA)/PCR technology that involves the crosslinking of physically proximal sequences was used (de Vree et al., Nat Biotechnol, 32, 1019-1025 2014; see Material and Methods). The TLA data obtained from bone marrow cells from AAVS1/CD46-tg mice were then aligned with a reference mouse genome (FIG. 69). TLA results indicate that the 18 kb AAVS1 locus is integrated into chromosome 14 at the location (Chr14:110443871-110461834) (FIG. 55B). Using this information, primers were used to sequence into the locus (FIG. 70). Repeats of the AAVS1 locus facing left-to-right and right-to-left were found. Both terminal repeats (#1 and #5) were truncated and 4.5 and 2.8 kb long, respectively. Repeat #5 lacked a complete 5′ homology region. This constellation of target sites complicated the integration site analysis. Some of the theoretical outcomes for the integration by the HDAd-CRISPR+HDAd-donor system the outlined in FIG. 70.

[0970] Chromosomal integration after ex vivo and in vivo HSC transduction with HDAd-CRISPR+HDAd-donor. First genomic Southern blot was performed on DNA from bone marrow cells harvested at week 16. Hybridization of EcoRI-digested genomic DNA with an AAVS1 specific probe showed in all analyzed mice a 3.9 kb-specific band indicative for integration of the donor cassette into one (or more) repeats of the AAVS1 locus (FIG. 71A). Hybridization of Blp1-digested DNA with the GFP probe resulted in 5.8 kb signals in 5 out 10 mice representative for integration into the full-length repeats #2-4 (FIG. 71B). The 5 and 6 kb signals could be the result of integration into repeat #1 and 5, respectively. Two out of ten mice appeared to have integrations into several AAVS1 motif repeats. To demonstrate the presence of transgene/chromosome junctions, iPCR was performed on genomic DNA from mice (FIGS. 72A, 72B). Six out of eight mice analyzed displayed PCR products consistent with HDR-mediated integration into the AAVS1 site (FIG. 72B). Several of these mice had additional bands that resulted from integration into one of the CRISPR/Cas9 off-target sites on chromosome 5 (FIG. 72B). Bands that originated from integration of the full-length HDAd genome involving the ITRs as junctions were also found. Interestingly, these integrated full-length HDAd genomes were on chromosome 14, the chromosome containing the CRISPR AAVS1 target site (FIG. 72B). In an attempt to de-complex these results derived from a pool of bone marrow cells, d GFP+bone marrow Lin⁻ cells were plated to generate progenitor colonies derived from single cells (FIG. 72C). Analysis of colonies from mice with only one band specific for HDR-integration into AAVS1 (e.g. mouse #943) showed homogenous signals in all colonies, whereas colonies from mice with additional off-target integration (e.g. #946) showed a chimeric pattern: nine out of ten colonies with only on-target integration, one colony containing both on-target and off-target integrations, which is possible because the average number of integrated transgenes per genome is 2. Integration site analysis of bone marrow cells in the ex vivo and in vivo transduction studies with HDAd-CRISPR and HDAd-globin-donor vector revealed a similar outcome (FIGS. 73A & 73B, showing on-target integration (FIG. 73A) and samples with on- and/or off-target integration (FIG. 73B)). In the ex vivo HSC transduction setting with HDAd-CRISPR +HDAd-globin-donor, a higher rate of animals with targeted integrations were found compared to the in vivo HSC transduction study with the HDAd-GFP-donor vector. This may be due to a higher HDR efficacy based on longer homology regions.

[0971] Overall these integration studies indicate a high frequency of targeted integrations into the AAVS1 loci. A fraction of integrations occurred into CRISPR off-target sites and possibly into regions that involved CRISPR-triggered large deletions on the chromosome that contained the target site.

[0972] Discussion Self-inactivating lentivirus vectors, in contrast to gamma-retrovirus vectors, have not been associated with insertion site-associated malignant clonal expansions in clinical HSC gene therapy trials. However, this risk cannot be completely excluded as a recent study in non-human primates indicates (Espinoza et al., Mol Ther, 6, 1074-1086, 2019). Theoretically, the random integration pattern mediated by SB100x and the lack of a preference for integration into activate genes and promoters should be safer but concerns about genotoxicity remain. Therefore, a major effort in the field is aimed toward targeted transgene integration into preselected sites such as the AAVS1 site. Zinc finger nuclease mRNA and AAV6-mediated donor template delivery in human HSCs resulted in >50% targeted integration into the AAVS1 locus (De Ravin et al. Nat Biotechnol, 34, 424-429, 2016). In other studies that employed an AAVS1-specific CRISPR/Cas9 RNP and AAV6 to deliver the donor template, the frequency of site-specific integration was 25% (Johnson et al., 2018. Sci Rep, 8, 12144). Similar rates were achieved for targeted integration into CCR5 (Hung et al., Mol Ther, 26, 456-467, 2018).

[0973] This approach for targeted integration into AAVS1 has a number of new aspects. (i) The use of a helper-dependent, capsid-modified HDAdvector to deliver the donor template. Corresponding genomes are double stranded, linear DNA covalently linked on both ends to the viral TP protein. It is thought that, in contrast to single-stranded AAV6 donor vectors, double-stranded, linear adenoviral DNA is not an optimal template for HDR. To compensate for this potential disadvantage, AAVS1 CRISPR/Cas9 cleavage sites were incorporated into the HDAd-donor vectors to create free “recombinogenic” DNA ends. (ii) Because the insert capacity of HDAdvectors is 30 kb it was possible to incorporate homology arms that would exceed the packaging capacity of rAAV6 or IDLV vectors. Previous studies (Balamotis et al., Virology, 324, 29-237, 2004, Ohbayashi et al., Proc Natl Acad Sci USA, 102, 13628-13633, 2005, and Suzuki et al., Proc Natl Acad Sci USA, 105, 13781-13786, 2008) and the comparison of HDAd-donor vectors with 0.8 and 1.8 kb homology regions suggest that increasing the homology improved the number of responder mice with high level transgene expression as well as the fraction of mice with targeted integration. (iii) The large HDAd5/35++insert capacity also allowed for the inclusion of the mgmt^{P140K}-based in vivo selection cassette into the donor template, thus mediating selective survival and expansion of progeny cells without affecting the pool of transduced primitive HSCs by short term treatment with low-dose O⁶BG/BCNU (Wang et al., Mol Ther Methods Clin Dev, 8, 52-64, 2018). Considering the low efficacy of HDR and consequently targeted integration in HSC (Genovese et al., Nature, 510, 235-240, 2014), in vivo HSC selection appears to be crucial to achieve high transgene marking levels in peripheral blood cells. (iv) Finally, because of the ease to produce high yields of HDAd5/35++ vectors and their tropism for primitive HSCs, they can be used for in vivo HSC transduction via intravenous injection into mobilized animals. Therefore, it was possible to perform a proof-of-principle of in vivo HSC gene therapy of hemoglobinopathies with targeted transgene integration.

[0974] To achieve stable transgene (GFP or γ-globin) expression, the coinfection of HDAd-donor and HDAd-CRISPR was essential, suggesting that CRISPR-mediated genomic DNA breaks and, most likely, the release of the donor template from the HDAd-donor vector greatly stimulated integration. An indicator for transgene integration into HSCs after in vivo transduction with HDAd-donor+HDAd-CRISPR was the fraction of mice that displayed stable high-level transgene expression after the completion of in vivo selection (i.e. “responders”). It was 6 out of 16 (37.5%) for the HDAd-GFP-donor+HDAd-CRISPR and 4 out of 5 (80%) for the HDAd-globin-donor+HDAd-CRISPR. Notably, the “responder” rate with a high frequency of targeted integration was 100% for both vectors in the ex vivo transduction setting. This indicates that a limiting factor for the targeted in vivo HSC transduction approach is the efficacy of HSC infection. The initial infection step could theoretically be improved by an optimized HSC mobilization regimen (Psatha et al., Hum Gene Ther Methods, 25, 317-327, 2014) and two rounds of HDAd injection one day apart.

[0975] These data indicate that the vector system is an efficient tool to achieve targeted integrations in HSC in ex vivo and in vivo transduction settings. This may be due, in large part, to the high efficacy of HDAd-donor vector delivery to the nucleus of non-dividing cells, the ability to release the donor cassette from the vector backbone, and the HDAd vectors' capacity to incorporate large homology regions.

[0976] An important finding in this study was that the targeted integration system conferred higher transgene expression levels than the SB100x-based system in the in vitro, ex vivo, and in vivo transduction setting. This is particularly relevant for gene therapy of hemoglobinopathies (β₀/β₀ thalassemia and Sickle Cell Disease) which requires γ-globin at levels that are >20% of adult globin levels. In “responder” mice that were ex vivo or in vivo transduced with the HDAd-CRISPR+HDAd-globin-donor, these theoretically curative levels were achieved. This an important improvement over a previous study in a thalassemia mouse model where the SB100x transposase system was utilized for γ-globin gene addition (Wang et al., J Clin Invest, 129, 598-615, 2019). Epigenomic effects on transgene expression may be less pronounced after integration into the AAVS1 locus which is known to maintain an open chromatin configuration in HSCs (Wang et al., Genome Res, 17, 1186-1194, 2007, Huser et al., PLoS Pathog, 6, e1000985, 2010, van Rensburg et al., Gene Ther, 20, 201-214, 2013) and in AAVS1 transgenic mice. On the other hand, it cannot be excluded that random SB100x-mediated integration places transgenes into regions that are subjected to silencing.

[0977] The integration site analyses suggest a near 100% targeted integration efficacy after in vitro transduction of HUDEP-2 cells. In ex vivo and in vivo HSC transduction studies, both Southern blot and iPCR on genomic bone marrow DNA showed efficient targeted integration in bone marrow HSCs. For example, iPCR of integration junctions documented targeted integration in 75% of mice, with most of these mice having no off-target integration. This was further confirmed by analysis of colonies derived from single CFUs. At a low frequency, integrations were also found in two of the in silico predicted CRISPR Cas9 off-target sites. Furthermore, full-length HDAd-donor genomes integrated in chromosome 14, the chromosome that carries the AAVS1 loci, were found. It was previously found that HDAd ITRs are prone to DNA breaks and that this can result in inefficient integration into genomic sites in which DNA breaks occur (Wang et al., J Virol, 79, 10999-11013, 2005, Wang et al., J Virol, 80, 11699-11709, 2006). Considering recent studies on CRISPR/Cas9-induced undesired large deletions/translocations (7-8 kb) around the target site (Kosicki et al., Nat Biotechnol, 36, 765-771, 2018), it is possible that CRISPR-Cas9 DNA breaks far away from the target site could be implicated in the integration of complete HDAd genomes. Overall, reports on large deletions/translocations question the safety of CRISPR/Cas9. On the other hand, because no developmental effects associated with CRISPR/Cas9-mediated germline editing in animals have been reported so far, it is likely that cells with such deleterious chromosomal changes are selected out during development. Support for this hypothesis comes from a recent NHP study in which CRISPR Cas9-edited HSCs were transplanted and a 9 kb deletion in the HBG1/2 region disappeared in PBMCs over time (Humbert et al., 23rd Annual Meeting of the ASGCT, abstract #974, 2019).

[0978] From these studies, it can be concluded that the AAVS1tg mouse model is suboptimal for targeted integration studies involving CRISPR/Cas9 because of the presence of multiple AAVS1 target loci, some of which were truncated to a degree that they lost areas of homology with the HDAd-donor vector. The presence of truncated AAVS1 loci also suggests that rearrangement can occur in AAVS1 transgenic mice as reported previously (Linden et Proc Natl Acad Sci USA, 93, 7966-7972, 1996).

### Example 6. Prophylactic In Vivo Hematopoietic Stem Cell Gene Therapy with an Immune Checkpoint Inhibitor Reverses Tumor Growth in a Syngeneic Mouse Tumor Model

[0979] At least some of the information contained in this example was published in Li et al. (Cancer Res. 80(3):549-560, 2020; published online Nov. 14, 2019).

[0980] Population-wide testing for cancer-associated germline mutations has established that more than one-fifth of ovarian and breast carcinomas are associated with inherited risk. Salpingo-oophorectomy and/or mastectomy are currently the only effective options offered to women with high-risk mutations. The goal is to develop a long-lasting approach that provides immuno-prophylaxis for carriers of inherited mutations. This approach leverages the fact that at early stages, tumors recruit hematopoietic stem/progenitor cells (HSPCs) from bone marrow and differentiate them into tumor-promoting cells. A technically simple technology has been developed to genetically modify HSPCs in vivo. The technology involves HSPC mobilization and intravenous injection of an integrating HDAd5/35++ vector. In vivo HSPC transduction with a GFP-expressing vector and subsequent implantation of syngeneic tumor cells showed >80% GFP-marking in tumor infiltrating leukocytes. To control expression of transgenes, a miRNA regulation system that is activated only when HSPCs are recruited to and differentiated by the tumor was developed. The approach was tested using the immune checkpoint inhibitor αPDD-L1-γ₁ as an effector gene. In in vivo HSPC-transduced mice with implanted mouse mammary carcinoma (MMC) tumors, after initial tumor growth, tumors regressed and did not recur throughout the observation period. The regression was T-cell mediated. “Conventional” treatment with an anti-PD-L1 monoclonal antibody had no significant anti-tumor effect, indicating that early, self-activating expression of αPDD-L1-γ₁ can overcome the immunosuppressive environment in MMC tumors. The efficacy and safety of the approach was further validated in an ovarian cancer model with typical germ-line mutations (ID8 p53^{-/-} brca2^{-/-}), both in a prophylactic and therapeutic setting.

[0981] Materials and Methods.

[0982] HDAd5/35++ vectors: HDAd-SB is described in Richter et al., Blood. 128: 2206-2217, 2016. The mouse αPD-L1-γ1 transgene is described in Engeland et al., Mol Ther. 22: 1949-1959, 2014); and the production of HDAd5/35++ vectors in 116 cells is described in Palmer et al., Methods in Molecular Biology, 33-53, 2009. Helper virus contamination levels were found to be <0.05%. Titers were 6-12×10¹² vp/ml. All HDAd vectors used in this study contain chimeric fibers composed of the Ad5 fiber tail, the Ad35 fiber shaft, and the affinity-enhanced Ad35++fiber knob (Wang et al., J Virol. 82: 10567-10579, 2008). All of the HDAd preparations had less than one copy wild-type virus in 1010 vp measured by qPCR using the primers described elsewhere (Haussler et al., PLoS One. 6: e23160, 2011)

[0983] Construction of the HDAd-GFP/mgmt and HDAd-αPD-L1γ₁miR423 vectors. Step 1: The PGK promoter, β-globin 3′ UTR and BGH polyA fragments were PCR amplified from pHCA-HBG-CRISPR/mgmt. (Li et al., Blood. 2018; 131: 2915-2928), followed by insertion into the BstBI site of pBS-Z-Ef1α (Saydaminova et al., Mol Ther Methods Clin Dev. 1: 14057, 2015) by Gibson assembly (New England Biolabs), generating pBS-PGK-3′UTR. The GFP coding sequence was PCR amplified from pHM5-frt-IR-EF1α-mgmt-2a-GFP (Wang et al., Mol Ther Methods Clin Dev. 8: 52-64, 2018) and ligated with EcoRI linearized pBS-PGK-3′UTR, generating pBS-PGK-GFP. Step 2: The Ef1α-mgmt^{P140K}-SV40 pA-cHS4 insulator cassette was amplified from pHM5-T/pLCR-γ-globin-mgmt-FRT2 (Li et al., Mol Ther Methods Clin Dev 9: 142-152, 2018) and ligated with PacI-digested pHM5-T/pLCR-γ-globin-mgmt-FRT2, forming pHM5-FRT-IR-Ef1α-mgmt. A BsrGI site at 3′ side of cHS4 was introduced by primer for downstream use. The bacterium plasmid backbone of pHM5-FRT-IR-Ef1α-mgmt was switched to the backbone from pBS-Z-Ef1a using primers containing 15 bp homology arm (HA) for later infusion cloning (Takara, Mountain View, Calif.), generating pBS-FRT-IR-Ef1α-mgmt. The two 15 bp HAs flanking the two Frt-IR components can be exposed upon PacI digestion to facilitate recombination with the modified pHCA construct described below. Then, the PGK-GFP-3′UTR-BGHpA fragment was moved from pBS-PGK-GFP in step 1 to the BsrGI site of pBS-FRT-IR-Ef1α-mgmt, generating pBS-FRT-IR-GFP/mgmt. Step 3: The original PacI site in pHCA was destroyed by inserting two annealed oligo sequences. A new PacI site together with two HAs were created at BstBI site. Finally, after PacI digestion of both pBS-FRT-IR-GFP/mgmt and modified pHCA, the products were recombined by infusion cloning, generating pHCA-FRT-IR-GFP/mgmt, which was used for subsequent virus rescue. HDAd-αPDD-L1γ₁ was constructed similarly as HDAd-GFP/mgmt described elsewhere in this Example, except instead of GFP coding sequence, the anti-PD-L1-γ₁ transgene was inserted into the EcoRI of pBS-PGK-3′UTR at step 1. For microRNA regulated gene expression, synthesized 4×miR423 oligos (forward (SEQ ID NO: 24); reverse (SEQ ID NO: 25)) were annealed and inserted into the AvrII-XhoI sites of pBS-PGK-3′UTR, generating pBS-PGK-miR423-3′UTR, which was then used for anti-PD-L1-γ₁ insertion.

[0984] HDAd-GFP-423 was constructed in a similar way by inserting the 4×miR423 target sites into the 3′UTR of HDAd-GFP/mgmt.

[0985] Flow cytometry: Cells were resuspended at 1×10⁶ cells/100 μL in PBS supplemented with 1% FCS and incubated with FcR blocking reagent (Miltenyi Biotech, Auburn Calif.) for ten minutes on ice. Next the staining antibody solution was added at 100 μL per 10⁶ cells and incubated on ice for 30 minutes in the dark. After incubation, cells were washed once in FACS buffer (PBS, 1% FBS). For secondary staining the staining step was repeated with a secondary staining solution. After the wash, cells were resuspended in FACS buffer and analyzed using a LSRII flow cytometer (BD Biosciences, San Jose, Calif.). Debris was excluded using a forward scatter-area and sideward scatter-area gate. Single cells were then gated using a forward scatter-height and forward scatter-width gate. Flow cytometry data were then analyzed using FlowJo (version 10.0.8, FlowJo, LLC). Matched isotype-controls were included in all experiments.

[0986] Flow cytometry for immunophenotyping: Lymphocyte flow cytometry panel 8c (CD45-APC/Cy7, clone 30-F11, cat #103116; CD3-APC, clone 17A2, cat #100236; CD4-PE/Cy7, clone GK1.5, cat #100422; CD8a-PE, clone 53-6.7, cat #100708; CD25-BV421, clone PC61, cat #102043; CD19-6V510, clone 6D5, cat #115546; all these antibodies were from BioLegend) and myeloid panel 9c (CD45-APC/Cy7, clone 30-F11, BioLegend, cat #103116; CD11c-APC, clone N418, BioLegend, cat #117310; F4/80-PE, clone C1:A3-1, Cedarlane, cat #CL8940PE; MHCII-BV510, clone M5/114.15.2, BioLegend, cat #107635; Siglec F-PerCP, clone 1RNM44N, eBioscience, cat #46-1702-82; Ly6C-BV421, clone AL-21, BD Biosciences, cat #562727; CD11b-PE/Cy7, clone M1/70, eBioscience, cat #25-0112-82; Ly6G-BV605, clone 1A8, BioLegend, cat #127639) were used. The gating strategy is shown in FIG. 76. LSK (lineage⁻/Sca-1⁺/c-Kit⁺) cells were characterized previously in Richter et al., Blood. 2016; 128: 2206-2217. The following antibodies were also used: biotin-conjugated lineage detection cocktail (Miltenyi Biotec, San Diego, cat #130-092-613); anti-mouse LY-6A/E (Sca-1)-PE-Cyanine7 (clone D7, eBioscience, San Diego, cat #25-5981-82); anti-mouse CD117 (c-Kit)-PE (Clone 2B8, eBioscience, San Diego, cat #12-1171-83); anti-mouse CD3-APC (clone 17A2, Invitrogen, Waltham, Mass., cat #17-0032-82); anti-mouse CD19-PE-Cyanine7 (clone eBio1D3, eBioscience, San Diego, cat #25-0193-82); anti-mouse Ly-6G (Gr-1)-PE, (clone RB6-8C5, eBioscience, San Diego, Calif., cat #12-5931-82); anti-human CD46-APC (clone E4.3, BD Pharmingen, San Diego, Calif., cat #564253).

[0987] IFNγ-flow cytometry: Splenocytes were isolated by passing freshly harvested spleen through a 70 μm cell strainer attached to a 50 mL Falcon tube. After centrifugation at 300×g for 10 minutes, red blood cells were removed by resuspending cells in 1 mL 1×BD Pharm Lyse™ lysing solution (BD Pharmingen, San Diego, Calif., cat #555899) and incubating for 30 seconds. 20 mL RPMI-1640 medium was added to stop lysing reaction. Following centrifugation and resuspension in RPMI-1640 medium with 10% heat-inactivated FBS, 100 units/ml penicillin and 100 mg/ml streptomycin, the obtained splenocytes were cultured at 5×10⁶ cells/ml (200 μl/well) in 96-well tissue culture plates in a humidified incubator with 5% CO₂. 1× Cell Stimulation Cocktail plus protein transport inhibitors (eBioscience, San Diego, cat #00-4975-93) was presented in the culture medium for induction and accumulation of IFN-γ production within the cells. After stimulation for 12 hours, the cells were collected, stained first with cell surface markers as described above, and then subject to intracellular staining for IFN-γ (BioLegend, San Diego, Calif., cat #505842) according to the manufacturer's instructions.

[0988] Neu-tetramer flow cytometry: The PE-labeled H-2Dq/RNEU420-429 (H-2D(q) PDSLRDLSVF) (SEQ ID NO: 290) tetramer was obtained from the National Institute of Allergy and Infectious Diseases MHC Tetramer Core Facility (Atlanta, Ga.), and used according to the manufacturer's instructions.

[0989] Isolation of tumor-infiltrating leukocytes for flow cytometry, FACS, and Western blot: Mice were sacrificed when tumor volume reached 500 mm³. Tumors were harvested, diced and digested with 300 U/mL Collagenase I (Sigma-Aldrich, St. Louis, Mo., cat #C0130) and 1 mg/mL Dispase II (Sigma-Aldrich, cat #4942078001) in 5 mL of RPMI 1640 for 30 minutes at 37° C. with gentle mixing. After digestion, 2000 U/mL DNase I (Sigma-Aldrich, cat #260913) was added to reduce viscosity by removing released DNA. Single cell suspension was obtained by passing the digested tissue through a 70 μm cell strainer using a syringe plunger. Subsequently, tumor infiltrating leukocytes were purified from the single cell suspension using mouse CD45 (TIL) MicroBeads (Miltenyi Biotech, Auburn Calif., cat #130-110-618).

[0990] Immunofluorescence studies: Tumor slides were fixed with acetone/methanol (10 min) and washed twice with PBS. Slides were blocked for 20 min at room temperature using PBS with 5% blotting grade milk (Bio-Rad, Hercules, Calif.) followed by incubation with primary antibodies in PBS for 1 h at room temperature. Then slides were washed twice with PBS and incubated with secondary antibodies for 1 h at room temperature followed by washing with PBS three times. Slides were washed twice with PBS, mounted with Mounting Medium for Fluorescence (Vector Laboratories Burlingame, Calif.) and then analyzed using a fluorescence microscope. Laminin was detected using anti-laminin polyclonal (primary) antibody (1:200; #Z0097; Dako, Carpinteria, Calif.) and goat anti-rabbit IgG Alexa Fluor568 (secondary) antibody (1:200; Molecular Probes, Carlsbad, Calif.).

[0991] Immunohistochemistry of mouse tissues: Tissues were fixed in 10% formalin and processed for hematoxylin and eosin staining. All samples were examined by two experienced pathologists for typical inflammation signs in a blinded manner.

[0992] T-cell assays: MMC cells (Neu-positive) and splenocytes from syngeneic neu/CD46-transgenic mice (Neu-negative) were treated with mitomycin C at a final concentration of 50 μg/m for 20 min, and then washed extensively. Splenocytes from test animals (HDAd-αPDD-L1-γ₁ treated) and untreated control animals (naïve) were mixed 1:1 with mitomycin C treated cells and incubated for 1 day in the presence of 10 U/ml IL-2. Control splenocytes were also treated with PMA/ionomycin. IFNγ concentrations in the supernatant were measured by IFNγ ELISA (InVitrogen, cat #88-7214-22)

[0993] MicroRNA array analysis was performed by the UW Functional Genomics, Proteomics & Metabolomics Facility Core using Affymetrix miRNA 4.0 arrays

[0994] Real-time PCR: Total RNA was extracted from tumor infiltrating leukocytes, PBMCs, splenocytes and bone marrow cells using TRIzol™ per manufacturer's instructions (Invitrogen), then reverse transcribed to generate cDNA using QuantiTect Reverse Transcription Kit from Qiagen (cat #205311). The gDNA wipe-out reagent provided in the kit was used to eliminate potential genomic DNA contamination. Comparative real-time PCR was performed using Power SYBR Green PCR master mix (Applied Biosystems). The following primers were used: anti-mouse PDL1 forward (SEQ ID NO: 238), and reverse (SEQ ID NO: 239); mouse PPIA forward (SEQ ID NO: 240), and reverse (SEQ ID NO: 241); mouse RPL10 forward (SEQ ID NO: 189), and reverse (SEQ ID NO: 190).

[0995] Mouse PPIA was used as an internal control. A second internal control mouse RPL10 was also included and similar results were observed. Results were calculated according to 2^{(-ΔΔCt)} method and presented as percentage of relative expression, with setting the cDNA level of corresponding tumor samples as 100%.

[0996] Isolation of lineage-depleted (Lin⁻) bone marrow cells: For the depletion of lineage-committed cells, the mouse lineage cell depletion kit (Miltenyi Biotec, San Diego, Calif.) was used according to the manufacturer's instructions.

[0997] Colony forming unit assay. A total of 2500 Lin⁻ cells were plated in triplicates in ColonyGEL 1202 mouse complete medium (Reach Bio, Seattle Wash.) and incubated for 12 days at 37° C. in 5% CO₂ and maximum humidity. Colonies were enumerated using a Leica MS 5 dissection microscope (Leica Microsystems).

[0998] Cells: Mouse Mammary Carcinoma (MMC) cells were established from a spontaneous tumor in a neu/CD46-tg mouse. MMC cell authentication was performed by immunofluorescence using the Neu-specific monoclonal antibody 7.16.4 (Knutson et al., Cancer Res. 2004; 64: 1146-1151). TC-1 cells were from the American Type Culture Collection (ATCC, Manassas, Va.). TC-1 cells are immortalized murine epithelial cells that stably express HPV-16 E6 and E7 proteins. C57Bl/6-derived ovarian cancer ID8 p53^{-/-} brca2^{-/-} cells were described previously. Walton et al., Cancer Res. 2016; 76: 6118-6129. This cell line was generated by CRISPR/Cas9 knock-out of p53 and brca2 in 1D8 cells. MMC and TC-1 cells were maintained in RPMI-1640 supplemented with 10% fetal calf serum, 1 mmol/1 sodium pyruvate, 10 mmol/1 HEPES, 2 mmol/1 L-glutamine, 100 units/ml penicillin and 100 mg/ml streptomycin. 1D8 p53^{-/-} brca2^{-/-} cells were cultured in DMEM supplemented with 4% fetal calf serum, 100 μg/mL penicillin, 100 μg/mL streptomycin, and ITS (5 μg/mL insulin, 5 μg/mL transferrin, and 5 ng/mL sodium selenite). Absence of mycoplasma was confirmed using the PCR Mycoplasma Detection Kit from abm (Richmond, BC, Canada). For amplification cryopreserved cells were thawed and passaged four times.

[0999] Ovarian cancer biopsies were provided by the Pacific Ovarian Cancer Research Consortium (POCRC) Specimen Repository without any confidential information which would serve to identify a patient (Fred Hutchinson Cancer Research Center IRB protocol #6289). Tumor tissue from biopsies was dissected into 4 mm pieces and digested for 2 hours at 37° C. with collagenase/dispase (Roche) as described previously in Strauss et al. (PLoS One. 6: e16186, 2011). Leukocytes were isolated by magnetic activated cell sorting using human CD45 microbeads (Miltenyi Biotech, cat #130-045-801). Tumor-associated leukocytes from two high-grade serous ovarian cancer biopsies were pooled and RNA was analyzed by miRNA-Seq in comparison to matching PBMC RNA by LC Sciences, LLC (Houston, Tex.).

[1000] MicroRNA analyses: miRNA-Seq: Small RNA sequencing was performed as previously described (Valdmanis et al., Nat Med. 2016; 22: 557-562.). RNA was extracted using a miRNeasy mini kit (Qiagen Cat #1071023). 1 μg of RNA per sample was ligated to a 3′ Universal miRNA Cloning Linker (New England Biosciences cat #S1315) using T4 RNA Ligase 1 (New England Biosciences cat #M0204) in the absence of ATP. Ligated samples were run on a 15% urea-polyacrylamide gel. Fragments corresponding to small RNAs (17-28 nt) were cut from the gel and ligated to 5′ barcodes, again using T4 RNA ligase 1. Barcoded samples were then multiplexed and sequenced on an Illumina MiSeq machine obtaining 50 bp single-end reads, at the UW Center for Precision Medicine. The barcodes and adaptors were trimmed from the sequence and subsequently aligned to mouse microRNAs on miRBase using Bowtie version 0.12.7, allowing for 2 mismatches (Langmead et al., Genome Biol. 10: R25, 2009).

[1001] Northern blot for small RNA. This protocol is described in Valdmanis et al., Nat Med. 2016; 22: 557-562. The following ³²P-γ-ATP labeled probes were used: for miRNA 423-5p (SEQ ID NO: 235); for U6 snRNA (SEQ ID NO: 236). Radioactive RNA molecular weight markers were from Ambion.

[1002] Western blot: Tissue lysates were separated by SDS-PAGE and blots were incubated with chicken anti-HA-tag-HRP (Abcam, ab1190). Chemiluminescence detection on X-ray films was performed after treatment with Pierce™ ECL Plus Western Blotting Substrate (Thermo Fisher Scientific, cat #34029).

[1003] αPD-L1-γ₁ ELISA: Recombinant mouse PD-L1 protein (Sino Biological Inc, cat #50010-MO8H) at 2 μg/ml were used to coat ELISA plates. Serum from test animals was added at a 1:10 dilution and αPD-L1-γ₁ was measured using chicken anti-HA-tag-HRP (Abcam, ab1190).

[1004] Animals: All experiments involving animals were conducted were conducted with approval from the controlling Institutional Review Board and IACUC.

[1005] hCD46-transgenic mice: C57Bl/6 based transgenic containing the human CD46 genomic locus and expressing CD46 at a level and in a pattern similar to humans are described in Kemper et al. (Clin Exp Immunol. 124: 180-189, 2001). They were used in transplantation studies with C57Bl/6 derived TC-1 cells. Neu transgenic mice: Neu-tg mice (strain name: FVB/N-Tg(MMTVneu)202Mul) were obtained from the Jackson Laboratory (Bar Harbor, Me.). These mice harbor nonmutated, nonactivated rat neu under control of the mouse mammary tumor virus promoter (one transgene copy per genome). For in vivo transduction studies, CD46tg and neu-tg mice were crossed to obtain CD46^{+/+}/neu+ mice.

[1006] In Vivo HSPC Transduction/Selection: see FIG. 74A.

[1007] CD8 cell depletion: CDβ-T cells were depleted using intraperitoneal injection of 200 μg rat anti-mouse CD8 IgG (169.4; ATCC). Injection was repeated every 3 days to maintain the depletion.

[1008] Statistics: Statistical significance of in vivo data was analyzed by Kaplan-Meier survival curves and log-rank test (Graph Pad Prism Version 4). Statistical significance of in vitro data was calculated by two-sided Student's t-test (Microsoft Excel). P values >0.05 were considered not statistically significant (n.s.).

[1009] Results and Discussion.

[1010] Women who have at least one first-degree relative diagnosed with breast cancer before the age of 50 or with ovarian cancer at any age, are now referred to genetic testing. Using targeted capture and massively parallel genomic sequencing, a series of multi-gene tests have been established that detect germ-line mutations and predict the risk of cancer onset. Among these test platforms is BROCA (Walsh et al., Proc Natl Acad Sci USA. 108: 18032-18037, 2011, Shirts et al., Genet Med. 18: 974-981, 2016). Using BROCA, it has been established that more than one-fifth of ovarian and breast carcinomas are associated with inherited risk (Tung et al., Cancer. 121: 25-33, 2015). The problem is that the current options for prevention in high-risk carriers lag behind the constantly improving genetic diagnostics. Side effects of prophylactic salpingo-oophorectomy and mastectomy, including infertility, cardiovascular disease, osteoporosis, menopausal symptoms, and psychological effects, are expected throughout the woman's life. Use of serum markers such as CA125 and HE4 did not show significant reduction of ovarian cancer mortality (Jacobs et al., Lancet. 387: 945-95, 2016). Prophylactic vaccines against tumor-associated antigens like Her2/neu, HIF1α, or MUC1 rely on the presence of these antigens on all tumor cells, and are plagued by the development of antigen-loss mutants (Knutson et al., Cancer Res. 64:1146-1151, 2004).

[1011] The goal is to develop a long-lasting and technically simple approach that allows for the immuno-prophylaxis of cancer in patients with high-risk for tumor recurrence and, ultimately, in carriers of cancer-predisposing inherited mutations. During tumor progression, malignant cells secrete a number of specific chemokines that activate and mobilize HSPCs so that they enter the blood circulation and localize to the tumor where they are differentiated into tumor-supporting cells (Hanahan et al., Cell. 144: 646-674, 2011, Mantovani et al., Trends Immunol. 23: 549-555, 2002). HSPC-derived myeloid and lymphoid cells are present in early stages of cancer development (Okla et al., Front Immunol. 10: 691, 2019; Colvin, Front Oncol. 4: 137, 2014; Baert et al., Front Immunol. 10: 1273, 2019), for example in serous tubal intraepithelial carcinoma (STIC). Sarkar et al., Genes Dev. 31: 1109-1121, 2017. This approach is based on the genetic modification of hematopoietic stem cells. Because these cells are capable of self-renewal, a one-time intervention should have a life-long therapeutic effect. A minimally invasive and cost-efficient technology was developed that made in vivo gene delivery into HSPCs without leukapheresis, myeloablation and transplantation possible (Richter et al., Blood. 128: 2206-2217, 2016, Wang et al., J Clin Invest. 129: 598-615, 2019). The central idea of this approach is to mobilize HSPCs from the bone marrow using G-CSF/AMD3100, and while they circulate at high numbers in the periphery, transduce them with an intravenously injected HSPC-tropic helper-dependent adenovirus HDAd5/35++gene transfer vector system. These vectors use CD46, a receptor that is expressed on primitive hematopoietic stem cells. Transduced cells return to the bone marrow where they persist long-term. Novel features of the HDAd5/35++ vector system used in this study include: (i) CD46-affinity enhanced fibers that allow for efficient transduction of primitive HSPCs while avoiding infection of non-hematopoietic tissues after i.v. injection (including liver), (ii) a SB100X transposase-based integration system that functions independently of cellular factors and mediates random transgene integration without a preference for genes with one to two integrated vector copies per cell (FIG. 74A), and (iii) a MGMT^{P140K} expression cassette mediating selective survival and expansion of progeny cells without affecting the pool of transduced primitive HSPCs by short term treatment with low-dose O⁶BG/BCNU (Wang et al., Mol Ther Methods Clin Dev. 8: 52-64, 2018). The efficacy and safety of the in vivo HSPC gene therapy method in mouse models for hemoglobinopathies was recently demonstrated (Wang et al., J Clin Invest. 129: 598-615, 2019, Li et al., Blood. 131: 2915-2928, 2018). Here, this approach is used for prevention of cancer growth.

[1012] GFP expression in tumor-infiltrating leukocytes after in vivo HSPC transduction. Two human CD46 transgenic mouse models with syngeneic tumors were employed. (CD46 is required for HSPC transduction with HDAd5/35++ vectors). The first model included human CD46/rat neu-transgenic mice that overexpress rat neu in breast tissue from a mouse mammary tumor virus promoter. Neu-tg mice develop active immune tolerance towards Neu, which is dependent on Tregs and is similar to what is observed in breast cancer patients (Knuston et al., J Immunol. 177: 84-91, 2006). Mouse mammary carcinoma cells (MMC) are a Neu-positive breast cancer cell line derived from a spontaneous neu/CD46-transgenic mouse tumor (FIG. 75). HSPCs were mobilized in neu/CD46 tg mice and an integrating GFP-expressing HDAd5/35++ vector (FIG. 74A) was injected. Similar to previous studies (Wang et al., Mol Ther Methods Clin Dev. 8: 52-64, 2018), three rounds of low-dose treatment with O⁶BG/BCNU resulted in stable GFP expression in 80% of PBMCs (FIG. 74). At week 17 after in vivo HSPC transduction, syngeneic MMC cells were implanted into the mammary fat pad and tumor growth was monitored. When tumors reached a volume of 700 mm (Palmer et al., Methods in Molecular Biology, 2009:33-53), animals were sacrificed and GFP expression was analyzed. 80% of bone marrow cells, splenocytes, PBMCs, and tumor-infiltrating leukocytes expressed GFP (FIG. 74B). In the tumor, GFP+ cells were found predominantly in tumor stroma (FIG. 74C). Immunophenotyping showed that GFP+tumor-infiltrating cells were lymphocytes (predominantly Tregs), neutrophils, DCs/MDSCs, and macrophages (FIGS. 74D, 76). This pattern differed from that of GFP+ cells in peripheral blood (FIG. 74D), bone marrow and spleen (FIG. 77), indicating that tumors actively differentiate HSPCs into specialized pro-tumor cells. Efficient recruitment of in vivo transduced HSPCs to the tumor was further confirmed in a second model consisting of CD46tg mice and TC-1 cells, a HPV16 E6/E7-positive mouse lung cancer cell line (FIGS. 78A-78C).

[1013] miRNA-regulated transgene expression in tumor-infiltrating leukocytes. FIG. 74B and FIG. 78C illustrate that GFP (under the control of the ubiquitously active EF1α promoter) is not only expressed in tumor-infiltrating leukocytes but also in other tissues including bone marrow, spleen, PBMC, and resident macrophages. To minimize auto-immune reactions, the therapy approach requires that the therapeutic transgene (i) be predominantly expressed in the tumor, (ii) automatically activate only when the tumor begins to develop, and (iii) cease when the tumor disappears. These requirements can be met through miRNA regulation. During hematopoiesis, the miRNA profile changes depending on the differentiation stage and cell lineage (Chen et al., Science. 2004; 303: 83-86). Tumor-associated myeloid cells have distinct mRNA and miRNA expression profile (Thorsson et al., Immunity. 48: 812-830 e814, 2018). Finally, there is a high degree of conservation of miRNAs in myeloid and lymphoid cells found in different tumor types in humans (Thorsson et al., Immunity. 48: 812-830 e814, 2018). The principle of miRNA regulation of transgene expression is shown in FIG. 79A. Using the in vivo HSPC-transduced mouse models, GFP+/CD45+ cells from bone marrow, spleen, PBMCs, and tumor were sorted (FIGS. 74B, 78C) and their miRNA expression profile was analyzed. The goal was to find miRNAs that were expressed at high levels in bone marrow, blood and spleen cells, but were absent in tumor-associated leukocytes. Total RNA (pooled from five mice) was subjected to next generation miRNA sequencing (FIGS. 79B, 79C). A series of miRNAs that fulfilled the above criteria were identified. miR423-5p, a miRNA that was on the top of the list, both in the neu/CD46tg-MMC (FIG. 79B) and in the CD46tg-TC-1 model (FIG. 79C) was focused on. miR-423-5p is conserved between humans and mice and could therefore be used in the further development of the approach towards the clinic. The expression profile of miRNA-423-5p in GFP+ fractions from in vivo transduced mice with MMC and TC-1 tumors was validated by microRNA array (not shown) and Northern Blot analysis (FIG. 81).

[1014] To assess whether miR-423-5p regulation could also be used in humans, levels of miR-423-5p in a published dataset that evaluated microRNAs across a series of human tissues were examined. Ludwig et al., Nucleic Acids Res. 2016; 44: 3865-3877. It was found that miR-423-5p is in the top 20% of expressed microRNAs and has even distribution across tissues, including in the bone marrow and spleen (FIG. 82A). Matching PBMCs and tumor biopsies were obtained from two patients with high-grade serous ovarian cancer. miRNA-Seq was performed on RNA from tumor-infiltrating (CD45+) leukocytes vs RNA from matching PBMCs (FIG. 82B). This analysis confirmed high-level expression of miR423-5p in PBMCs and low-level expression in tumor-infiltrating leukocytes. These data demonstrate that the results observed in mice have the strong potential to be translated to human studies.

[1015] Effect of HDAd-mediated miR-423 target site expression on HSPCs. miRNA-423-5p is expressed in all normal tissues and therefore, most likely, involved in the regulation of gene expression. A search of target mRNAs for miR-423-5p in “mirtarbase” identified the cyclin-dependent kinase inhibitor 1A (CDKNIA) mRNA as the primary target (available online at mirtarbase.mbc.nctu.edu.tw/php/detail.php?mirtid=MIRT000589#target). Other target mRNAs include transcription elongation factor A like 1 (TCEAL1), bcl2 like 11 (bcl2L11), and proliferation-associated 2G4 (PA2G4). To assess whether added expression of miR-423-5p target sites from HDAd vectors influences the expression of CDKNIA, two HDAd-GFP vectors with and without the target sites linked to a GFP containing mRNA were constructed (FIG. 80A). Mouse and human HSPCs, i.e. cell types with high level miR-423-5p expression, were infected at MOIs that would result in the transduction of the vast majority of cells (Li et al., Mol Ther. 27(12):2195-2212, 2019) and analyzed CDKN1A protein levels three days later by Western blot (FIG. 80B). A significant difference between the two HDAd vectors in both cell types was not found. Furthermore, no detrimental effects of miR-423-5p target site overexpression were observed in progenitor colony assays (FIG. 80C). As outlined elsewhere herein, in vivo HSPC transduction with a therapy vector that contained the miR423-5p target sites did not cause abnormalities in hematopoiesis. Taken together, this suggests that the disclosed miR-423-5p-based regulation system is safe in HSPCs.

[1016] Immuno-prophylaxis study. In hereditary breast and ovarian cancer, genetic variants disrupt DNA repair mechanisms resulting in higher mutational burden and neoantigen presence. This makes the tumors more amenable to immunotherapies than non-heritable breast and ovarian cancers, which are often characterized by aberrant copy number and low immunogenicity (Thorsson et al., Immunity. 2018; 48: 812-830 e814). Here, the checkpoint inhibitor αPD-L1-γ1 was selected as the immunotherapeutic transgene. Previously, it was shown that intratumoral αPD-L1-γ1 expression after viral gene transfer resulted in tumor growth attenuation (Engeland et al., Mol Ther. 22: 1949-1959, 2014, Reul et al., Front Oncol. 9: 52, 2019). In MMC cell cultures, strong PD-L1 expression was observed (FIG. 83A), which should make MMC tumors susceptible to αPD-L1-γ1 therapy. Four copies of miR423-5p target sites were integrated into a globin 3′ UTR linked to the αPD-L1-γ1 gene (FIG. 83B). The experimental scheme was the same as shown in FIG. 74A. In mice that were in vivo transduced with the control HDAd-GFP/mgmt vector, implanted MMC tumors grew rapidly and reached the endpoint volume by day 35 after tumor cell transplantation (FIG. 83C, left panel). In the αPD-L1-γ1 model, after initial tumor growth, 6 out of 7 tumors regressed and did not recur within the observation period (100 days). Treated mice rejected another challenge of MMC cells given 11 weeks after the first injection. Depletion of CD8 cells by anti-CD8 mAb injections abolished the therapeutic effect. Anti-tumor T-cell responses were measured at the end of the observation period (day 100). Analysis of splenocytes by flow cytometry showed a significant higher percentage of interferon-γ (IFNγ)-producing CD4 and CD8 cells as well as a higher frequency of CD8 cells that stained positive with a Neu-tetramer (FIG. 83D). Splenocytes from HDAd-αPD-L1-γ1-treated animals exhibited a 30-fold greater IFNγ secretion upon stimulation with (Neu-positive) MMC cells, compared to Neu-negative cells (FIG. 83E). As expected, naïve CD46/neu-tg mice possessed Neu-specific T-cells, which however could not control tumor growth due to the presence of immunosuppressive T-cells in the tumor (Knutson et al., J Immunol. 2006; 177: 84-91).

[1017] Kinetics and specificity of αPD-L1-yi expression in the MMC/neu-transgenic mouse model. In a separate group of HDAd-αPDLlyimiR423-treated animals, tumors were harvested at day 17 after implantation before they started to shrink. In these tumors (300-400 mm³), 10-fold higher levels of αPD-L1-γ₁ were observed in the tumor than in PBMCs, bone marrow, and spleen by Western blot analysis 8 (FIG. 84A). Preferential expression of αPD-L1-γ₁ mRNA in tumor-infiltrating leukocytes was confirmed by qRT-PCR (FIG. 84B). This expression pattern suggested that miR-423-regulation suppressed αPD-L1-γ₁ expression in HSPC progeny other than tumor-infiltrating myeloid and lymphoid cells. Serum αPD-L1-γ₁ became detectable after MMC cell injection and declined once tumors had disappeared, indicating a functional autoregulation of αPD-L1-γ₁ expression (FIG. 84B) i.e. the transgene expression started only once HSPGs differentiated into tumor-associated leukocytes. Starting from week 2 after MMC cell injection, auto-immune reactions were observed, reflected by fur discoloration and inflammatory infiltrates in tissues (FIG. 87, showing mice in FIG. 87A and samples of kidney, liver, and lung in FIG. 87B). Importantly, in animals sacrificed 4 weeks after tumor disappearance, the histology of all organs returned to normal. This observation indicates that as long as αPD-L1-γ₁ is expressed and released into the blood stream, transient auto-immune reactions (most likely against neu-expressing tissues/cell types) can occur. Notably, a study with a HDAd αPD-L1-γ₁ vector without miR-423-5p target sites had to be terminated because >20% weight loss occurring in treated animals two weeks after the last O⁶BG/BCNU treatment. This underscores the necessity for regulated αPD-L1-γ₁ expression. The observed auto-immune reactions could be minimized by physical tethering of αPD-L1-γ₁ to the tumor or by the use of intracellular immunomodulatory effectors (e.g. miRNAs that repolarize tumor-promoting leukocytes into tumor-killing cells). Furthermore, vectors could also contain a truncated EGFR receptor that allows for the destruction of all transduced cells by antibody (Erbitux)-dependent cytotoxicity (Wang et al., Blood. 2011; 118: 1255-1263).

[1018] The efficacy of the in vivo HSPC αPD-L1-γ₁ gene therapy approach is remarkable considering that in the neu-tg/MMC model, other immunotherapy approaches did not prevent tumor recurrence (Knutson et al., Cancer Res. 64:1146-1151, 2004, Burgents et al., J Immunother. 33: 482-491, 2010). In this context, four rounds of intraperitoneal injection of an anti-mouse PD-L1 monoclonal antibody had no significant effect on tumor growth (FIGS. 88A, 88B). These data indicate that intratumoral expression of αPD-L1-γ₁ 1 early during tumor development (as soon as HSPC progeny cells infiltrate the tumor) can tip the balance between suppressor and effector immune cells towards tumor elimination.

[1019] Immunoprophylaxis and therapy studies in an ovarian cancer model with p53 and brca2 mutations. C57Bl/6 derived murine ovarian cancer ID8 cells do not contain typical cancer-associated germ-line mutations (brca1, brca2, p53, Nf1, Rb1, Pten . . . ) and poorly form tumors after intraperitoneal injection. Walton et al., Cancer Res. 76: 6118-6129, 2016. Newer improved ID8-derived models, created by CRISPR/Cas9 knockout of tumor-suppressor genes, address these deficiencies. Walton et al., Cancer Res. 2016; 76: 6118-6129; Walton et al., Sci Rep. 2017; 7: 16827. Among these models are ID8-p53^{-/-}-brca2^{-/-} cells. Intraperitoneal injection of 2×10⁶ ID8-p53^{-/-}-brca2^{-/-} cells into CD46-transgenic mice resulted in tumor growth and onset of ascites (or death) within 6-8 weeks (FIGS. 84C and 85A). Intraperitoneal tumors were widespread along the mesenterium with invasion of other organs (spleen, liver, lymph nodes). Immunophenotyping of tumor-infiltrating leukocytes in intraperitoneal ID8-p53^{-/-}-brca2^{-/-} tumors showed the pronounced presence of Tregs as well as immunosuppressive DCs/MDSCs as well as TAMs (FIG. 85B). Tumor infiltrating T-cells (TILs), macrophages (TAMs), and neutrophils (TANs) were isolated from peritoneal ID8 p53^{-/-} brca2^{-/-} tumors and miRNA-423-5p levels were analyzed by Northern blot. As observed in the MMC and TC-1 models, miR-423-5p was expressed in bone marrow mononuclear cells but not detectable in tumor-infiltrating leukocytes including TILs, TANs, and TAMs) indicating that all three cell types had been specifically reprogrammed by the tumor (FIG. 85C).

[1020] First, the ID8-Trp53^{-/-}-brca2^{-/-} model was used in a prophylactic setting (FIG. 85D). After HSPC in vivo transduction/selection with HDAd-αPDL1γ₁miR423+HDAd-SB or HAd-GFP-miR423+HDAd-SB (control), ID8-p53^{-/-} brca2^{-/-} cells were injected intraperitoneally and serum αPDL1γ1 levels and onset of morbidity and ascites were monitored. While all control mice reached the endpoint by day 70 after in vivo transduction, 100% of HDAd-αPDL1γ₁miR423+HDAd-SB treated animals were alive at the end of the monitoring period (11 weeks after tumor cell inoculation) (FIG. 85E). Elevated serum αPDL1γ1 levels around week 6 (post cell injection) suggest that tumors had grown and activated serum αPDL1γ1 expression (FIG. 85F). By week 11, serum αPDL1γ1 returned to background levels indicating that tumors had been cleared. In this study, signs of auto-immune reactions (e.g. fur discoloration) were not observed, most likely due to the absence of antigens shared between the tumor and normal tissues (e.g. Neu). In the context of assessing the safety of the described approach, it was also shown that in vivo HSPC transduction with HDAd-αPDL1γ₁miR423 did not cause abnormalities in hematopoiesis (FIGS. 88C, 88D). In mice implanted with syngeneic tumor cells, percentage of GFP positive cells in PBMCs was measured at indicated time points, and GFP positive cells were harvested for miRNAseq (FIG. 88E). Results identified miRNAs with expression patterns of interest (FIG. 58E). Western blot for PDL1 in tumor (TILs), PBMCs, bone marrow, and spleen are shown and quantified as expression relative to mRNA in FIG. 88F. Serum αPDLA ELISA OD45o before tumor implantation and at indicated time points after implantation are shown are also shown in FIG. 88F. Schematic representations are shown in FIGS. 88G and 88H.

[1021] While a prophylaxis approach has the advantage of commencing automatically at a very early stage of tumor-development, its immediate application in healthy women carrying high-risk mutations will likely face regulatory hurdles in clinical translation. A more realistic goal, therefore, is to use this approach to prevent cancer recurrence after first-line therapy. In this case, in vivo HSPC selection can be directly embedded into the chemotherapy treatment of patients. FIG. 86A shows how in clinical setting, in vivo HSC transduction will start after surgical tumor debulking, or, if surgery is not an option, together with chemotherapy. O⁶BG/BCNU in vivo selection can be combined with chemotherapy. As a result of in vivo HSPC transduction/selection, armed HSPCs will lay dormant until cancer recurs which will trigger HSPC differentiation and activation of effector gene expression. This setting also has the advantage that tumor-specific neo-antigens and the immuno-phenotype of the tumor will be known from the analysis of surgical biopsies, which would allow for selecting the adequate immunotherapy effector genes. On the other hand, preventing the recurrence of cancer with “fully fledged” cancer hallmarks (Hanahan et al., Cell. 2011; 144: 646-674) is more challenging than targeting a tumor at early stages of development.

[1022] To simulate such a “therapeutic” setting, CD46-transgenic mice were injected first with ID8-Trp53^{-/-}-brca2^{-/-} cells followed by in vivo HSPC transduction/selection two weeks later (FIG. 86B). While all mice in the control setting (HDAd-GFP-miR423+HDAd-SB transduced HSPCs) reached the end point by week 12 after tumor cell injection, all mice treated with the αPDL1-γ₁ expressing vector were healthy at week 15 (FIG. 86C). As in the prophylaxis study, elevated serum αPDL1-γ₁ levels at week 11 suggest that tumors initially grew but disappeared once the self-regulated αPDL1-γ₁ mechanism was activated (FIG. 86D). These data indicate that the described approach could prevent cancer recurrence after surgery/first-line chemotherapy.

[1023] An mRNA profiling/Northern blot analyses for tumor-infiltrating leukocytes present in TC-1 (mouse lung-cancer) tumors (FIGS. 78A-81), MMC (mouse breast cancer) tumors (FIGS. 79A-79C and 81), and ID8-p53^{-/-}/brca2^{-/-} (mouse ovarian cancer tumors) (FIG. 85C) was performed. It was found in all three tumor types that miR423-5p is undetectable, but present at high-levels in normal hematopoietic compartments. Together with the data from human ovarian cancer biopsies (FIGS. 82A, 82B), this indicates that the miR423-5p-based system can be broadly used for different tumor types across species for the regulation of effector gene expression.

[1024] Considering the limited prophylactic options that are currently offered to women with germ-line mutations associated with high-risk of cancer onset, and the increasing numbers of these carriers due to population-wide screening, this in vivo HSPC gene therapy approach is a promising strategy that addresses a major medical problem.

### Example 7. In Vivo HSC Gene Therapy Using Erythroid Cells as a Factory for High-Level Production of a Secreted Therapeutic Protein

[1025] This example shows expression of a non-erythroid protein in erythroid cells and storage of that expressed protein in mature red blood cells after in vivo HSC transduction/selection. This system can be used to provide life-long therapeutic correction after a single intravenous intervention. At least some of the information contained in this example was published in Wang et al. (Blood Adv 3(19): 2883-2894, 2019; e-pub Oct. 4, 2019).

[1026] 2.4 million new erythrocytes are produced per second in human adults, Nearly a quarter of the cells in the human body are red blood cells (Pierige et al., Adv Drug Deliv Rev. 60(2):286-295, 2008). In the process of erythropoiesis HSCs differentiate through common myeloid progenitors and pre-erythroblasts to orthochromatic erythroblasts (based on Wright's stain). At this stage, the nucleus is expelled, and the cells exit the bone marrow into the circulation as reticulocytes. 0:5% to 2.5% of circulating red blood cells in adults (1×10⁵/μl) and 2% to 6% in infants are reticulocytes. Reticulocytes are still capable of producing hemoglobin from mRNA. After one to two days, these ultimately lose all organelles and become mature red blood cells, which are not capable of protein biosynthesis anymore. Differentiation from committed erythroid progenitors to erythrocytes takes 7 days. Erythrocytes have a lifespan of 120 days. Old and dying erythrocytes are removed by the phagocytic system of the spleen.

[1027] Once HSCs have differentiated into committed erythroid cells, enormous amounts of α and β globin chains are produced and then later stored in erythrocytes as tetrameric hemoglobin. A healthy individual has 12 to 20 grams of hemoglobin per 100 ml of blood and 95% of the erythrocyte weight is hemoglobin (270×10⁶ Hb molecules per cell). The basis for this efficient biosynthesis is strong erythroid specific locus control regions (LCRs) that allow for high-level transcription and stable mRNA that is efficiently translated.

[1028] The tremendous speed and efficacy of erythropoiesis and the powerful machinery for hemoglobin production was used to produce non-erythroid secreted proteins from erythrocyte precursor cells (encompassing the differentiation stages from proerythroblasts to reticulocytes). Transgenes were under the control of a mini-β-globin LCR and contained 5′UTR regions of the β-globin gene for mRNA stabilization, To allow for long-term life-long production of therapeutic proteins, the gene transfer vectors targeted primitive HSCs. The in vivo HSC transduction approach involves G-CSF/AMD3100-triggered mobilization of HSCs from the bone marrow into the peripheral blood stream and the intravenous injection of an integrating, helper-dependent adenovirus vector system. Transgene integration is achieved (in a random pattern) using a hyperactive Sleeping Beauty transposase (SB100x), however, in particular embodiments, could be achieved through homology directed repair.

[1029] As a proof or principle that erythroid cells can be used for high-level production of therapeutic proteins that are secreted into the blood circulation, the focus herein was on a bioengineered form of coagulation factor VIII. The outcome of the study is relevant for hemophilia A treatment. Recently, clinical advancements have been made using recombinant adeno-associated virus (rAAV)-based gene therapy for liver-directed factor IX gene transfer for hemophilia B (High et al., Methods Mol Biol. 2011; 807:429-457). Preclinical studies also demonstrated the feasibility of treating hemophilia A with FVIII expressing rAAV vectors in animal models (Brown et al., Mol Ther Methods Clin Dev. 1:14036, 2014, Callan et al., PLoS One. 11(3):e0151800, 2016, Greig et al., Hum Gene Ther. 28(5):392-402, 2017). However, the widespread application of liver-directed rAAV hemophilia A gene therapy could face several obstacles: (i) the mostly episomal nature of rAAV genomes in hepatocytes and their loss due to cell division, specifically in children. (ii) the high cost of rAAV vector production, (iii) the limited packaging capacity of rAAV which cannot accommodate large transcriptionally regulatory elements often required to prevent gene silencing or genotoxicity (Grieger et al., J Virol. 79(15):9933-9944, 2005, Chandler et al., J Clin Invest. 125(2):870-880, 2015), and (iv) the increased risk of tumorigenicity due to potential rAAV integration near proto-oncogenes (Russell et al., Nat Genet. 2015; 47(10):1187-1193), specifically in patients with underlying liver disease, such as viral hepatitis, or in children with actively dividing hepatocytes, which represent a large fraction of hemophilia patients (Nault et al., Mol Cell Oncol. 3(2):e1095271, 2016, Nault et al., Nat Genet. 47(10):1187-1193, 2015).

[1030] The approach to express FVIII from erythroid cells using HDAd vectors addresses these problems. This study shows, using GFP as a reporter gene under control of the mini LCR that it is possible to achieve expression of a non-erythroid protein in erythroid cells and storage of GFP in mature red blood cells after in vivo HSC transduction/selection (see FIGS. 89A-89H). It was then demonstrated in “healthy” hCD46 transgenic mice that the approach results in physiological levels of a bioengineered form of FVIII and a phenotypic correction in a hemophilia A mouse model despite the presence of anti-FVIII plasma antibodies.

[1031] The proposed approach can provide life-long therapeutic correction after a single intravenous intervention. The enormous amplification of gene modified HSCs upon differentiation into red blood cells and the high-efficiency protein synthesis machinery of these cells create a basis for FVIII production at curative levels. Furthermore, the genetic modification of only a fraction of HSCs can result in tolerance against the transgene product. This newly developed approach for in vivo gene delivery into HSCs does not require myeloablation and HSC transplantation. It involves injections of G-CSF/AMD3100 to mobilize HSCs from the bone marrow into the peripheral blood stream and the intravenous injection of an integrating, helper-dependent adenovirus (HDAd) vector system (FIG. 90B). HDAd5/35++ and HDAd35 vectors target CD46, a receptor that is expressed on primitive HSCs. Transgene integration is achieved (in a random pattern) using a hyperactive Sleeping Beauty transposase (SB100x) (FIG. 90A). After in vivo HSC transduction/selection in CD46-transgenic mice, supraphysiological serum concentrations and activity of a bioengineered human factor VIII version (ET3) was demonstrated (FIGS. 90C-90I; 91A-91D; 92A-92G). The ET3 gene was under the control of a mini-β-globin LCR which restricted ET3 expression to erythrocytes. Despite high-level ET3 production from erythroid cells, no effects on hematopoiesis were observed. After initial development of inhibitory anti-ET3 antibody, serum antibody levels greatly decreased in 50% of treated mice most likely due to low level ET3 expression in the thymus and development of tolerance. After ex vivo and in vivo transduction of HSCs from CD46-tg/hemophilia A mice and subsequent transplantation into lethally irradiated hemophilia A mice, a phenotypic correction was achieved based on physiological factor VIII serum activity, normal aPTT, and normal bleeding time after tail clipping.

[1032] Discussion In addition to FVIII, the application of this approach for other secreted proteins can used, for example: (i) other coagulation factors, specifically FXI, FVII (Binny et al., Blood. 119(4):957-966, 2012), von Willebrand factor (VWF) (De Meyer et al., Arterioscler Thromb Vasc Biol. 28(9):1621-1626, 2008), but also rare clotting factors (i.e. factors I, II, V, X, XI, or XIII); (ii) enzymes that are currently used in Enzyme replacement therapies (ERT) for lysosomal storage diseases (taking advantage of the cross-correction mechanism) (Penati et al., J Inherit Metab Dis. 40(4):543-554, 2017) like Pompe disease (acid α-glucosidase), Gaucher disease (glucocerebrosidase), Fabry disease (α-galactosidase A), and Mucopolysaccharidosis type I (α-L-Iduronidase); (iii) immunodeficiencies e.g. SCID-ADA (Cicalese et al., Mol. Ther. 26(3):917-931 2018) (adenosine deaminase); (iv) cardiovascular diseases, e.g. familial apolipoprotein E deficiency and atherosclerosis (ApoE) (Wacker et al., Arterioscler Thromb Vasc Biol. 38(1):206-217, 2018); (v) viral infections by expression of viral decoy receptors (e.g. for HIV-soluble CD4 (Falkenhagen et al., Mol Ther Nucleic Acids. 9:132-144, 2017), or broadly neutralizing antibodies (bNAbs) for HIV (Kuhlmann et al., Mol Ther. 27(1):164-177, 2019), chronic HCV (Quadeer et al., Nat Commun. 10(1):2073, 2019), or HBV (Kuciinskaite-Kodze et al., Virus es. 211:209-221, 2016) infections; and (vi) cancer (e.g. controlled expression of monoclonal antibodies (e.g. trastuzumab (Zafir-Laviee et al, J Control Release. 291:80-89, 2018) or checkpoint inhibitors (e.g. αPDL1 (Engeland et al., Mol Ther. 22(11):1949-1959, 2014))).

### Example 8. Validation of Both the SB100x-Mediated Gene Addition and the BE-Mediated Reactivation of Endogenous γ-Globin in Non-Human Primates after In Vivo HSC Transduction

[1033] This example describes studies that will validate that both the SB100x-mediated gene addition and the BE-mediated reactivation of endogenous γ-globin are effective in non-human primates after in vivo HSC transduction.

[1034] Gene transfer vector: A gene transfer vector, HDAd-combo, will be used: The vector contains a SB100x transposase-mediated random genomic integration of the following transgenes: i) rhesus γ-globin gene under the control of a mini-LCR for efficient expression in red blood cells, rhesus mgmt^{P140K} under control of the ubiquitously active EF1a promoter for in vivo selection of transduced cells with O⁶BG/BCNU, GFP under control of the ubiquitously active EF1a promoter for analysis of peripheral blood T-cell transduction and vector biodistribution studies. It will further include adenine base editors for reactivation of endogenous γ-globin through inactivation of the BCL11a repressor protein binding sites in the HBG promoters and simultaneous inactivation of the erythroid bcl11a enhancer (which results in reduced BCL11a repressor protein expression in erythroid cells). Furthermore, the base editor expression cassette will be removed upon Flp recombinase mediated excision of the transposon resulting in only transient expression of iCas-BE. Lastly, the vector containing the SB100x transposase and Flp recombinase will not integrate and will be lost during HSC cell proliferation (FIG. 121).

[1035] Treatment protocol: The six-months study will be performed with three Macaca mulatta using previously tested HSC mobilization and O⁶BG/BCNU in vivo selection protocols (FIG. 122). The protocol will begin with testing one animal. The study will be repeated in the remaining two animals when no serious complications occur by week 8 (end of the last in vivo selection cycle).

[1036] Mobilization: There will be 5 days of GCSF and SCF given subcutaneously in the morning (50 μg/kg each). The last two days of GCSF/SCF+AMD3100 given subcutaneously will occur in the afternoon (5 mg/kg).

[1037] Pretreatment: Dexamethasone dosed at 4 mg/kg will be given intravenously 16 hours hour before HDAd5/35++injection. Methylprednisolone dosed at 20 mg/kg plus dexamethasone dosed at 4 mg/kg will be given intravenously, while anakinra dosed at 100 mg will be given subcutaneously 30 minutes before HDAd5/35++injection.

[1038] HDAd injection: Two rounds of HDAd injections will be given intravenously: 1) a low dose (3×10¹¹ vp/kg in 20 mL of phosphate buffered saline at 2 mL/min) on daγ-1, 2) two full doses (1×10¹² vp/kg in 20 mL of phosphate buffered saline at 2 mL/min) will be given 30 minutes apart at day 0.

[1039] Transient immunosuppression: Immunosuppression will begin starting at day 1 until the first dose of O⁶BG/BCNU (week 4), and if required, continued 2 weeks after the last dose of O⁶BG/BCNU. The immunosuppression will include 0.2 mg/kg/day of rapamycin, 30 mg/kg/day of mycophenolate mofetil, and 0.25 mg/kg/day of tacrolimus, all given daily, orally via food.

[1040] In vivo selection with O⁶BG/BCNU: O⁶BG: Animals will receive 120 mg/m² O⁶BG in 200 mL of saline, intravenously infused over at least 30 mins. BCNU will be administered 60 minutes after the start of O⁶BG infusion. Animals will then receive another dose of O⁶BG in 200 mL of saline intravenously over at least 30 mins six to eight hours after BCNU administration. The first treatment will be given four weeks after HDAd injection; the second and third treatment with 2 weeks intervals (optional), depending on γ-globin marking and hematology.

[1041] Data to be collected: Blood samples will be collected as indicated in FIG. 122. Daily physical observation and weekly body weight measurements will be performed.

[1042] Blood samples: For two and six hour blood samples, the following assays will be performed: percentage of GFP+ cells in CD34+ and percent of GFP+ cells in CD38-/Cd45RA, CD90+ cells will be quantified, colony forming unit assays will be used to assess percent of % GFP+ colonies, migrations towards SDF1-a, and percent expression of CXCR4 and/or VLA-4 (for examples, FIGS. 93B-93E). For all other samples, blood cell counts, chemistry, c-reactive protein, and proinflammatory cytokines will be measured. γ-globin expression will be measured via flow cytometry (erythroid/non-erythroid cells), while HPLC and qRT-PCR will be used to measure levels of re-activated vs added γ-globin. Cytospins will be used to assess γ-globin immunofluorescence. Vector copy number and Cas9, SB100x, and Flpe mRNA levels will be measured. GFP expression in white blood cells (CD4+, CD8+, CD25, CD45RO, CD45RA, CCR-7, CD62L, FOXP3, integrin αeβ7) will be measured.

[1043] Bone marrow samples: Bone marrow samples will be collected on day four and then monthly (see FIG. 122). Lineage composition of bone marrow samples will be assessed by flow cytometry. Vector copy numbers in CD34+ cells will also be measured. γ-globin will be assessed using flow cytometry by sorting with Ter119+/Ter119− markers. HPLC and qRT-PCR will be used to measure levels of re-activated vs added γ-globin. In addition to these analyses, upon necropsy, whole genome sequencing will be performed on CD34+ cells to identify SB100-mediated integrations and base editor off-target effects. RNA sequencing will also be performed on CD34+ cells to compare mRNA and miRNA profiles between pre- and post-treatment.

[1044] Tissues from necropsy (including germline tissues and semen): Routine histology will be performed, and vector copy numbers will be measured on major tissue groups. γ-globin and GFP immunofluorescence will be assess on tissue sections.

[1045] Outcome: This experiment will validate that both the SB100x-mediated gene addition and the BE-mediated reactivation of endogenous γ-globin are effective in non-human primates after in vivo HSC transduction. It will demonstrate that the vector will achieve γ-globin expression levels in red blood cells that would be curative in SCA patients (i.e. >80% γ-globin⁺ RBCs with γ-globin levels >20% of adult rhesus globin). It will also demonstrate an absence of long-term hematological side-effects and absence of undesired genomic rearrangements and changes in the transcriptome of HSCs. Lastly, it will demonstrate that intravenously injected HDAd5/35++ vector transduces memory T-cells.

### Example 9. Human and Rhesus Macaque HSC Transduction with HDAd5/35++ Vectors Expressing Base Editors for Re-Activation of Endogenous γ-Globin Bin Expression

[1046] Inactive Cas9 fused to a either a cytidine or adenine deaminase or transaminase may serve as tools to reactivate fetal globin. An HDAd vector expressing the cytidine base editor (HDAd-C-BE) was compared with a HDAd-CRISPR/Cas9 vector targeting the erythroid bcl11a enhancer and destroying a critical GATA binding motif (FIG. 123). An HDAd vector expressing a wild-type CRISPR against the same region was constructed. Both vectors were tested on human CD34+ cells that, after HDAd transduction, were subjected to erythroid differentiation over 18 days (FIG. 124A). For HDAd-wtCRISPR transduced cells, a gradual decline in the percentage of edited target sites was observed, most likely due to CRISPR-related cytotoxicity (FIG. 124B). While the efficacy of genome editing was lower for HDAd-C-BE vector, the editing rate remained stable, resulting in comparable reactivation of γ-globin (FIG. 124C). After transplantation, engraftment of HDAd-C-BE transduced CD34+ cells was as efficient as that of untransduced control cells (FIG. 125). In summary, these data indicate that base-editor vectors are, potentially, a better tool for genome editing in HSCs than wtCRISPR-expressing vectors. More recently, a series for HDAd vectors expressing adenine editors against three different regions in the HBG1/2 promoters were developed. It is expected that γ-globin reactivation can be substantially increased by simultaneously targeting several repressor levels with base editor vectors. Toward this goal HDAd vectors expressing base editors targeting the erythroid bcl11a enhancer (FIG. 126, upper panel) or the BCL11a protein binding site in the HBG1/2 were tested (FIG. 126, lower panel). γ-globin reactivation in an in vitro study was 9 and 53% for the two vectors, respectively.

[1047] Data in the SCA mouse model (Townes model): B6; 129-Hbb^{tm2(HBT1,HBB*)Tow}/Hbb^{tm3(HBG1,HBB)Tow}/^{Hbatm1(HBA)Tow}/J; hα/hα::β^{A}β^{S}, hα/hα::383 γ-β^{A}/-1400 γ-β^{S}.

[1048] The mice contain human α-globin, γ-globin (including -383 and -1400 regions containing the promoters), β⁸⁷-SCA globin instead of corresponding mouse genes and show a severe SCA phenotype (FIG. 127A) with 40% of reticulocytes in peripheral blood, low hematocrit, low hemoglobin levels, and leukocytosis (FIG. 127B). These mice were bred to achieve homozygosity for CD46 and the three globin gene substitution (CD46/Townes mice). It was tested to determine whether the previously developed HDAd-HBG-CRISPR vector would activate γ-globin after in vivo HSC transduction of CD46/Townes mice (FIG. 128A). Without O⁶BG/BCNU selection, γ-globin marking of RBCs reached 60%, indicating that the functional deficiency in erythropoiesis of Townes mice provides a strong proliferation stimulus for genome-edited HSCs/erythroid progenitor cells (FIG. 128B). The therapeutic effect of the HDAd-HBG-CRISPR vector was reflected in a greatly improved erythrocyte phenotype and an 5-fold reduction in peripheral reticulocytes (FIG. 128C). This indicates that a cure in this model (and potentially in SCA patients) could be achieved without the need of O⁶BG/BCNU in vivo HSC selection.

[1049] In vivo HSC gene transfer in non-human primates (NHPs): These data are from two NHPs (Macaca nemestrina) that received mobilization with G-CSF, SCF, and AMD3100 followed by injection of HDAd-GFP (FIG. 129A; FIG. 93A; FIGS. 94E-94G). Peripheral blood samples were collected immediately before vector injection, and 2 and 6 hours post vector injection. Isolated CD34+ cells were cultured ex vivo and plated in colony forming assays. An average of 3% of the CD34+ cells isolated following vector administration were GFP+ (FIG. 129B; FIGS. 93B, 93C; FIG. 94H), suggesting that mobilized CD34+ cells in peripheral blood can be transduced by a single intravenous administration of a HDAd5/35++ vector. To test whether these CD34+ cells retained colony-forming potential, colony assays were performed, and determined the percentage of colonies that carried the GFP transgene via PCR. Up to 55% of colonies derived from CD34+ cells from the post-injection time point were transduced by the vector (FIG. 129C; FIG. 93D; see also FIGS. 941-94M). Finally, to test the ability of in vivo vector-targeted cells to home back to the bone marrow compartment following peripheral mobilization, bone marrow aspirates were collected from one of the animals 3 days post vector administration. 3.7% or 2.9% of bone marrow-resident CD34+ cells were GFP+, and no appreciable difference in colony forming potential was observed in cells collected before vs. after in vivo delivery (FIG. 129D; FIG. 93E). These non-human primate studies (performed with a vector dose that was 10x lower than in mice) demonstrate that the described in vivo delivery approach is feasible and safe in a validated preclinical model.

### Example 10. In Vivo HSC Gene Therapy with Base Editors Allows for Efficient Reactivation of Fetal γ-Globin in β-YAC Mice

[1050] This example demonstrates that base editors delivered by HDAd5/35++ vectors in vivo are a useful and effective strategy for precise genome engineering, e.g., for the treatment of hemoglobinopathies.

[1051] Base editors are capable of installing precise nucleotide mutations at targeted genomic loci and present the advantage of avoiding double-stranded DNA breaks. Here, critical motifs were targeted regulating γ-globin reactivation with base editors delivered via HDAd5/35++ vectors. Through optimized design, a panel of cytidine and adenine base editors (CBE and ABE) targeting the BCL11A enhancer or recreating naturally occurring Hereditary Persistence of Fetal Hemoglobin (HPFH) mutations in the HBG1/2 promoter were successfully rescued. In HUDEP-2 cells, all five tested vectors efficiently installed target base conversion and led to substantially-globin reactivation. Significant γ-globin protein production (23% over β-globin) was observed by using an ABE vector HDAd-ABE-sgHBG #2 specific to the -113A to G HPFH mutation in HBG1/2 promoter. This vector was therefore chosen for downstream animal studies. Mice that carry a 248 kb of human β-globin locus (β-YAC mice) were used and thus accurately reflect globin switching. An EF1α-MGMT^{P140K} expression cassette flanked by FRT and transposon sites was included in the vector for allowing in vivo selection of transduced cells. After in vivo transduction with HDAd-ABE-HBG #2+HDAd-SB and low doses of chemoselection, an average of over 40% HbF-positive cells in peripheral red blood cells was measured. This corresponded to 21% γ-globin production over human β-globin. The -113 A to G conversion in total bone marrow cells was on average 20%. Compared to untransduced mice, no alterations in hematological parameters, erythropoiesis and bone marrow cellular composition were observed after treatment, demonstrating a good safety profile of the approach. No detectable editing was found at top-scored potential off-target genomic sites. Bone marrow lineage minus cells were isolated from primary mice at week 16 after transduction and infused into lethally irradiated C57BL/6J mice. The percentage of HbF-positive cells was maintained in secondary recipients over 16 weeks indicating genome editing occurred in long-term repopulating mouse HSCs. The observations demonstrate that base editors delivered by HDAd5/35++ vectors represent a promising strategy for precise in vivo genome engineering for the treatment of hemoglobinopathies.

[1052] Genome engineering strategies based on nucleases such as CRISPR/Cas9 have achieved remarkable advances, with multiple gene therapy studies having entered the phase of clinical evaluation. The CRISPR/Cas9-mediated gene editing relies on double-stranded DNA breaks (DSBs) that trigger endogenous repair mechanisms including classical non-homologous end joining (NHEJ). In the presence of a donor DNA template, homology-directed repair (HDR) can occur at a typically lower frequency. Latest studies have demonstrated highly efficient disruption of gene of interest in hematopoietic stem and progenitor cells (HSPCs) that are important for genetic therapy for blood disorders (Martin et al., Cell Stem Cell 24: 821-828.e825, 2019; Wu et al., Nature Medicine 25: 776-783, 2019). However, studies have reported that nuclease-induced DSBs may (Haapaniemi et al., Nature Medicine, 24(7):927-903, 2018; Ihry et al., Nature Medicine, 24(7):939-946, 2018; Kosicki et al., Nature Biotechnology 36: 765, 2018) cause side effects to host cells by generating unwanted large fragment deletion and p53-dependent DNA damage responses (Haapaniemi et al., Nature Medicine, 24(7):927-903, 2018; Ihry et al., Nature Medicine, 24(7):939-946, 2018; Kosicki et al., Nature Biotechnology 36: 765, 2018).

[1053] Base editors (BEs) are capable of installing precise nucleotide substitutions at targeted genomic loci without creating DSBs. They include a catalytically disabled nuclease, such as Cas9 nickase (nCas9) that is incapable of making DSBs, fused to a nucleobase deaminase enzyme and, in some cases, a DNA glycosylase inhibitor. Currently, there are two major categories, cytidine base editors (CBEs) and adenine base editors (ABEs), which convert C >T and A >G transitions, respectively, in a narrow targetable window (usually around 5 base pairs) dictated by a single guide RNA (sgRNA) coupled with the nCas9 (Gaudelli et al., Nature 551: 464-471, 2017; Komor et al., Nature 533: 420-424, 2016; Nishida et al., Science 353, 2016). The key difference between CBEs and ABEs is located in the deaminase region where CBEs contain a cytidine deaminase (e.g., APOBECI) and ABEs use laboratory-evolved TadA deoxyadenosine deaminases. Multiple groups have reported efficient base editing in a variety of eukaryotic cells (Zhang et al., Genome Biology 20: 101, 2019; Chadwick et al., Arterioscler Thromb Vasc Biol 37: 1741-1747, 2017; Zeng et al., Nature Medicine 26: 535-541, 2020; Lim et al., Mol Ther, 82(4):1177-1189, 2020; Gao et al., Nature 553: 217-221, 2018). It is predicted that 60% of all known pathogenic single nucleotide polymorphisms (SNPs) in humans can be potentially reversed by current BEs (Rees et al., Nature Reviews Genetics 19: 770-788, 2018).

[1054] β-hemoglobinopathies is a common group of genetic disorders with absent or deficient production or normal β-globin—mainly including β-thalassemia and sickle cell disease (SCD). Depending on the specific genetic defects, β-thalassemia and SCD patients exhibit various severity of disease manifestations. Although with newborn screening and treatment prophylaxis the mortality in SCD children has largely decreased, most β-thalassemia major (β⁰) and SCD patients suffer from lifelong acute and chronic complications (Ware et al., Lancet 390: 311-323, 2017; Higgs et al., Lancet 379: 373-383, 2012). However, in some adult patients with high level fetal hemoglobin (HbF), which predominates during much of gestation stage and is normally silenced shortly after birth, the disease symptoms are markedly milder. This phenomenon of hereditary persistence of fetal hemoglobin (HPFH) demonstrate a strong protective effect of HbF and provide a good rationale for reactivation of γ-globin as a gene therapy strategy for patients with β-globin disorders.

[1055] A number of HPFH mutations have been reported (reviewed by Orkin & Bauer, Annual Review of Medicine 70: 257-271, 2019 and Wienert et al., Trends in Genetics: TIG 34: 927-940, 2018). There are three major clusters of HPFH SNPs located at around -150, -175 and -200 sites in the HBG1/2 promoter. Introduction of HPFH mutations at these sites can disrupt the binding sites of HbF repressors (e.g., BCL11A and ZBTB7A) or create gain-of-function binding sites for activators (e.g., TAL1 and KLF1), leading to derepressed HbF expression (Traxler et al., Nature Medicine 22: 987-990, 2016; Martyn et al., Nature Genetics 50: 498-503, 2018). HbF reactivation can also be achieved by modulating the expression of HbF regulators, such as BCL11A, a major HbF repressor (Sankaran et al., Science 322: 1839-1842, 2008). Although direct BCL11A knock-out is not optional due to its developmentally indispensable roles, partial downregulation of BCL11A by editing its erythroid-specific enhancers allow for efficient HbF induction while maintaining animal viability (Wu et al., Nature Medicine 25: 776-783, 2019; Canver et al., Nature 527: 192-197, 2015). Using BE:sgRNA ribonucleoprotein (RNP) electroporation, a recent study has demonstrated that disruption of critical motifs in the +58 BCL11A enhancer with base editors leads to therapeutic HbF induction in patient-derived CD34⁺ HSPCs.

[1056] A simplified gene therapy approach has been recently established by in vivo HSC transduction. Help-dependent HDAd5/35++ vectors were used due to their multiple advantageous properties including chimeric fiber for HSC tropism, over 32 kb payload to accommodate most commonly used transgenes, etc. In this study, using optimized design a panel of BE vectors was successfully generated targeting the BCL11A enhancer or HBG1/2 promoter. In a transgenic mice model, it is shown here that in vivo HSC base editing with an HDAD-ABE vector recreated HPFH mutation and led to efficient HbF induction.

[1057] Materials and Methods.

[1058] Reagents for in vivo transduction and selection: G-CSF (Neupogen™) (Amgen, Thousand Oaks, Calif.), AMD3100 (MilliporeSigma, Burlington, Mass.) and Dexamethasone Sodium Phosphate (Fresenius Kabi USA, Lake Zurich, Ill.) were used. O⁶-Benzylguanine (O⁶-BG) and Carmustine (BCNU) were from MilliporeSigma.

[1059] Generation of HDAd vectors: Base editing systems developed by David R. Liu's lab at Harvard were used (Koblan et al., Nature Biotechnology 36: 843-846, 2018). pCMV_AncBE4max and pCMV_ABEmax plasmids were purchased from Addegene (Watertown, Mass.). The following plasmids from Addgene were also used: BE4, ABE7.10, pLenti-BE3RA-PGK-Puro and pLenti-FNLS-PGK-Puro and BE3RA in FIGS. 131A & 131B (Zafra et al., Nature Biotechnology 36: 888-893, 2018). Oligos and gBlocks described below were synthesized by Integrated DNA Technologies (IDT) (Coralville, Iowa) and listed in Table 14.

TABLE 14
Guide sequences for base editors.

| Editor | Name | Sequence (5′ to 3′)* | Targeting site/note |
|---|---|---|---|
| BCL11A | | | |
| CBE | sgBCL#1 | TTTAT [symbol] ACAGGCTCCAGGAA | GATAA motif |
| CBE | sgBCL#2 | TTTTAT [symbol] ACAGGCTCCAGGA | GATAA motif |
| ABE | sgBCL#3 | TTT [symbol] TCACAGGCTCCAGGAA | GATAA motif |
| ABE | sgBCL#4 | TTTT [symbol] TCACAGGCTCCAGGA | GATAA motif |
| ABE-xCas9 | sgBCL#5 | CTGTGATAAAAGCAACTGTT | GATAA motif, NGC PAM |
| ABE-xCas9 | sgBCL#6 | GATAAAAGCAACTGTTAGCT | GATAA motif, NGC PAM |
| HBG | | | |
| CBE | sgHBG#1 | CTTGA [symbol] AATAGCCTTGACA | TGACCA, −114−115 CC > GG |
| ABE | sgHBG#2 | CTTGACC [symbol] ATAGCCTTGACA | TGACCA, −113 A > G |
| ABE | sgHBG#3 | GCT [symbol] TTGGTCAAGGCAAGGC | −111 T > C |
| ABE | sgHBG#4 | GTGGGGAAGGGGCCCCCAAG | −198 T > C |
| CBE-xCas9 | sgHBG#5 | CCTTCCCCACACTATCTCAA | −197 C > T, −196 C > T, NGC PAM |
| ABE-xCas9 | sgHBG#6 | AGATATTTGCATTGAGATAG | −175 T > C, NGT PAM |
| HBB | | | |
| CBE | sgHBB_STOP | CTTGCC [symbol] CAGGGCAGTAA | HBB CDS, TGG > TAA (HBB STOP) |
| ABE | sgHBB_SKIP | AGACTCACCCTGAAGTTCTC | HBB intron, GT > GC (HBB splicing SKIP) |
| Positive control | | | |
| CRISPR/Cas9 | sgHBG_CRISPR | CTTGTCAAGGCTATTGGTCA | TGACCA |
| Negative controls | | | |
| CBE | sgNeg | GGTGTCGAAATGAGAAGAAG | CCR5 CDS, nt673 C > T (CCR5 STOP) |

Underlined: targeting base(s) in critical motifs.
*From top to bottom: SEQ ID NOs: 244, 245, 244, 245, 248-250, 250, 252-259.

[1060] CBE and first version of ABE constructs: The cloning involved 3 steps. Step 1) The BsmBI site in BE4 was destroyed by replacing the Eagl-Nael fragment with gBlock #1. The BsmBI site in pCMV_AncBE4max was destroyed by replacing the BsmBI-Narl fragment with gBlock #2. A vector named pBST-CRISPR with a BsmBI sgRNA cloning site was generated by combining the following four fragments using infusion (Takara, Mountain View, Calif.): a 2.3 kb U6-filler-gRNA scaffold fragment amplified from LentiCRISPRv2 (Addgene) using #3FR, a 1.4 k b and 1.0 kb fragments amplified from pBST-sgBCL11Ae1 (Li et al., Blood 131: 2915-2928, 2018) using #4FR and #5FR, respectively, and a 9.6 kb fragment of pBST-sgBCL11Ae1 released by Bsal-BamHI digestion. An intermediate plasmid pBS-U6-Ef1α was composed by joining the following three fragments using infusion: a 3.6 kb U6-filler-gRNA scaffold-Ef1α sequence and a 2.9 kb vector backbone amplified from pBST-CRISPR using primers #6FR and #7FR, respectively, and a 0.5 kb gBlock containing a BseRI cloning site (#8). This intermediate was digested with BseRI and recombined with the 5.5 kb fragment of BE4-ΔBsmBI after EagI-PmeI treatment, generating pBS-BE4. A 6.6 kb pBS backbone-U6-filler-gRNA scaffold-Ef1α, sequence was PCR amplified from pBS-BE4 using #9FR, followed by infusion with NotI-AgeI-digested pCMV-ABEmax and pCMV_AncBE4max-ΔBsmBI, generating pBS-AncBE4max and pBS-ABEmax, respectively. Next, sgRNA oligos were synthesized, annealed and inserted into the BsmBI site of pBS-BE4, pBS-AncBE4max and pBS-ABEmax, generating shutter plasmids with all-in-one base editing components, such as pBS-ABEmax-sgHBG #2. Step 2) A 21.0 kb pHCAS3-MCS vector with PacI cloning site was generated similarly as described previously (Li et al., Cancer Res 80: 549-560, 2020) except that the stuffer DNA was trimmed down by EcoRI restriction and re-ligation with a 1.8 kb EcoRI fragment. A 2.2 kb PGK-MGMT^{P140K}-2A-GFP-bGHpolyA sequence was amplified from pHCA-Dual-MGMT-GFP (Li et al., Blood 131: 2915-2928, 2018) by #10FR and recombined with PacI-digested pHM5-FRT-IR-Eflcc-GFP (Richter et al., Blood 128: 2206-2217, 2016), resulting in pHM5-FI-PGK-MGMT-GFP. Subsequently, the fragment between I-CeuI and PI-SceI sites was transferred from this construct to the PshAI site of pHCAS3-MCS by #11FR and infusion cloning, forming pHCAS3-FI-PGK-MGMT-GFP-MCS. Step 3) The shuttle plasmids from step 1 and the resultant vector from step 2 was treated with PacI and recombined to generate the final constructs, such as pHCA-ABEmax-sgHBG #2-FI-MGMT-GFP. Final pHCA constructs with different sgRNA sequences were generated similarly except that different sgRNA were used in step 1.

[1061] Second version of ABE constructs: The second version of ABE constructs differs from the first version in promoters, alternative codon usage and miRNA-regulated gene expression. The cloning also involved 3 steps. Step 1) A 1.5 kb 3′ β-globin UTR with miR183/218 target sequence was amplified from pBST-sgHBG1-miR (Li et al, Blood 131: 2915-2928, 2018) using primers #12FR, followed by insertion into NotI-HpaI sites of pBS-ABEmax-sgHBG #2, generating pBS-ABEmax-sgHBG #2-miR. Shuttle plasmids for the second version of ABE constructs, for example, pBS-ABEopti-sgHBG #2-miR, were obtained by joining the following 4 fragments with Ascl-EcoRV-digested pBS-ABEmax-sgHBG #2-miR by infusion cloning: a human PGK promoter amplified from pHM5-FI-PGK-MGMT-GFP using #13FR, two gBlocks (#14 and #15) containing the two TadA genes with alternative codon usage to reduce sequence repetitiveness, and a 1.9 kb sequence amplified from pBS-ABEmax-sgHBG #2 using #16FR. Step 2) The SV40 polyA sequence between PshAI-NotI sites of pHM-FRT-IR-Ef1α-MGMT(P140K)-2A-GFP-pA was replaced with a bGH polyA sequence (gBlock #17), getting pHM-FI-Ef1α-MGMT(P140K)-GFP-bGHpA. Then, the whole 4.9 kb transposon between I-CeuI and PI-SceI sites was transferred to the PshAI site of pHCAS3-MCS using #11FR, generating pHCAS3-FI-Ef1α-MGMT-GFP-MCS. Step 3) The resultant constructs from step 1 and 2 were combined by infusion cloning following Pact treatment, generating pHCA-ABEopti-sgHBG #2-FI-MGMT-GFP. Final pHCA constructs with different sgRNA sequences were generated similarly.

[1062] The Phusion Hot Start II High-Fidelity DNA Polymerase was used in all PCR amplifications involved in cloning. Final constructs were screened by several restriction enzymes (HindIII, EcoRI and PmeI) and confirmed by sequencing the whole region containing transgenes.

[1063] For the production of HDAd5/35++ vectors, corresponding plasmids were linearized with PmeI and rescued in 116 cells (Palmer & Ng, Mol Ther 8: 846-852, 2003) with AdNG163-5/35++, an Ad5/35++ helper vector containing chimeric fibers composed of the Ad5 fiber tail, the Ad35 fiber shaft, and the affinity-enhanced Ad35++fiber knob (Richter et al, Blood 128: 2206-2217, 2016). HD-Ad5/35++ vectors were amplified in 116 cells as described in detail elsewhere (Palmer & Ng, Mol Ther 8: 846-852, 2003). Helper virus contamination levels were found to be <0.05%. Titers were 2-5×10¹² viral particles (vp)/mL.

[1064] Transfection of cell lines: 293FT (Thermo Fisher Scientific) and K562 cells were cultured according to the vendors' instructions. 293FT cells pre-seeded in 6-well plate were transfected with 4 μg plasmids (3 μg base editor or CRISPR/Cas9+1 μg pSP-sgBCL11AE (Li et al., Mol Ther Methods Clin Dev 9: 390-401, 2018)) using lipofectamine 3000 (Thermo Fisher Scientific) per the manufacturer's protocol. K562 cells were transfected with 2.66 μg plasmids (2 μg base editor or CRISPR/Cas9+0.6 μg pSP-sgBCL11AE) using nucleofection (Catalog #V4XC-2024) (Lonza, Basel, Switzerland) according to the provider's protocol. Genomic DNA was isolated at 4 days after transfection for analyses.

[1065] HUDEP-2 cells and erythroid differentiation: HUDEP-2 cells (Kurita et al., PloS One 8: e59890, 2013) were cultured in StemSpan SFEM medium (STEMCELL Technologies) supplemented with 100 ng/mL SCF, 3 IU/mL EPO, 10⁻⁶ M dexamethasone and 1 μg/mL doxycycline (DOX). Erythroid differentiation was induced in IMDM containing 5% human AB serum, 100 ng/mL SCF, 3 IU/mL EPO, 10 μg/mL Insulin, 330 μg/mL transferrin, 2 U/mL Heparin and 1 μg/mL DOX for 6 days.

[1066] Colony-forming unit (CFU) assay: The lineage minus (Lin⁻) cells were isolated by depletion of lineage-committed cells in bone marrow MNCs using the mouse lineage cell depletion kit (Miltenyi Biotec, San Diego, Calif.) according to the manufacturer's instructions. CFU assays were performed using ColonyGEL (Reachbio, Seattle, Wash.) with mouse complete medium according to the manufacturer's protocol. Colonies were scored 10 days after plating.

[1067] T7EI mismatch nuclease assay: Genomic DNA was isolated using PureLink Genomic DNA Mini Kit per provided protocol (Life Technologies, Carlsbad, Calif.) (Miller et al., Nat Biotechnol 25: 778-785, 2007). A genomic segment encompassing the target site of erythroid BCL11A enhancer was amplified by PCR primers: BCL11A forward (SEQ ID NO: 247) and reverse (SEQ ID NO: 263). PCR products were hybridized and treated with 2.5 Units of T7E1 (New England Biolabs) for 30 minutes at 37° C. Digested PCR products were resolved by 10% TBE PAGE (Bio-Rad) and stained with ethidium bromide. 100 bp DNA Ladder (New England Biolabs) was used. Band intensity was analyzed using ImageJ software. % cleavage=(1-sqrt(parental band/(parental band+cleaved bands))×100%.

[1068] Flow cytometry: Cells were resuspended at 1×10⁶ cells/100 μL in FACS buffer (PBS, 1% FBS) and incubated with FcR blocking reagent (Miltenyi Biotech, Auburn Calif.) for ten minutes on ice. Next the staining antibody solution was added in 100 μL per 10⁶ cells and incubated on ice for 30 minutes in the dark. After incubation, cells were washed once in FACS buffer. For secondary staining the staining step was repeated with a secondary staining solution. After the wash, cells were resuspended in FACS buffer and analyzed using a LSRII flow cytometer (BD Biosciences, San Jose, Calif.). Debris was excluded using a forward scatter-area and sideward scatter-area gate. Single cells were then gated using a forward scatter-height and forward scatter-width gate. Flow cytometry data were then analyzed using FlowJo (version 10.0.8, FlowJo, LLC). For analysis of LSK cells, cells were stained with biotin-conjugated lineage detection cocktail (catalog #130-092-613) (Miltenyi Biotec, San Diego, Calif.), antibodies against c-Kit (clone 2B8, catalog #12-1171-83) and Sca-1 (clone D7, catalog #25-5981-82), followed by secondary staining with APC-conjugated streptavidin (catalog #17-4317-82) (eBioscience, San Diego, Calif.). Other antibodies from eBioscience included anti-mouse CD3-APC (clone 17A2) (catalog #17-0032-82), anti-mouse CD19-PE-Cyanine7 (clone eBio1D3) (catalog #25-0193-82), and anti-mouse Ly-66 (Gr-1)-PE, (clone RB6-8C5) (catalog #12-5931-82. Anti-mouse Ter-119-APC (clone Ter-119) (catalog #116211) was from Biolegend (San Diego, Calif.).

[1069] Intracellular flow cytometry detecting human γ-globin expression: The FIX & PERM™ cell permeabilization kit (Thermo Fisher Scientific) was used and the manufacture's protocol was followed. Briefly, 5×10⁶ HUDEP-2 cells were resuspended in 100 μL FACS buffer. 100 μL of reagent A (fixation medium) was added and incubated for 2-3 minutes at room temperature. 1 mL pre-cooled absolute methanol was then added, mixed and incubated on ice in the dark for 10 minutes. The samples were then washed with FACS buffer, resuspended in 100 μL reagent B (permeabilization medium) with 0.6 μg hemoglobin γ antibody (Clone 51-7, catalog #sc-21756 PE) (Santa Cruz Biotechnology, Dallas, Tex.), and incubated for 30 minutes at room temperature. After wash, cells were resuspended in FACS buffer and analyzed.

[1070] Globin HPLC: Individual globin chain levels were quantified on a Shimadzu Prominence instrument with a SPD-10AV diode array detector and an LC-10AT binary pump (Shimadzu, Kyoto, Japan). Vydac 214TP™ C4 Reversed-Phase columns for polypeptides (214TP54 Column, C4, 300 A, 5 μm, 4.6 mm i.d.×250 mm) (Hichrom, UK) were used. A 40%-60% gradient mixture of 0.1% trifluoroacetic acid in water/acetonitrile was applied at a rate of 1 mL/min.

[1071] Measurement of vector copy number: For absolute quantification of adenoviral genome copies per cell, genomic DNA was isolated from cells using PureLink Genomic DNA Mini Kit per provided protocol (Life Technologies), and used as template for qPCR performed using the power SYBR™ green PCR master mix (Thermo Fisher Scientific). The following primer pairs were used: MGMT forward (SEQ ID NO: 220), and reverse (SEQ ID NO: 221).

[1072] Real-time reverse transcription PCR: Total RNA was extracted from 5×10⁶ differentiated HUDEP-2 cells or 100 μL blood by using TRIzol™ reagent (Thermo Fisher Scientific) followed by phenol-chloroform extraction. QuantiTect reverse transcription kit (Qiagen) and power SYBR™ green PCR master mix (Thermo Fisher Scientific) were used. Real time quantitative PCR was performed on a StepOnePlus real-time PCR system (AB Applied Biosystems). The following primer pairs were used: mouse RPL10 (house-keeping) forward (SEQ ID NO: 189), and reverse (SEQ ID NO: 190); human γ-globin forward (SEQ ID NO: 191), and reverse (SEQ ID NO: 192); human β-globin forward (SEQ ID NO: 216), and reverse (SEQ ID NO: 217); mouse β-major globin forward (SEQ ID NO: 193), and reverse (SEQ ID NO: 194), mouse a globin forward (SEQ ID NO: 212), and reverse (SEQ ID NO: 213).

[1073] Detection of base editing: Genomic DNA was isolated as described above. Genomic segments encompassing the target sites of BCL11A enhancer and HBG1/2 promoter were amplified with KOD Hot Start DNA Polymerase (MilliporeSigma) using primers: HBG1 forward (SEQ ID NO: 31), reverse (SEQ ID NO: 33); HBG2 forward (SEQ ID NO: 69), reverse (SEQ ID NO: 72); and BCL11A primers shown above. The amplicons were purified by using the NucleoSpin Gel & PCR Clean-up kit (Takara) and sequenced with the following primers: HBG1-seq (SEQ ID NO: 105); HBG2-seq (SEQ ID NO: 237); and BCL11A-seq (SEQ ID NO: 247). The base editing level was quantified from Sanger sequencing results by using EditR 1.0.9 (Kluesner et al., CRISPR J 1: 239-250, 2018).

[1074] Animal studies: All experiments involving animals were conducted in accordance with the institutional guidelines set forth by the University of Washington. The University of Washington is an Association for the Assessment and Accreditation of Laboratory Animal Care International (AALAC)-accredited research institution and all live animal work conducted at this university is in accordance with the Office of Laboratory Animal Welfare (OLAVV) Public Health Assurance (PHS) policy, USDA Animal Welfare Act and Regulations, the Guide for the Care and Use of Laboratory Animals and the University of Washington's Institutional Animal Care and Use Committee (IACUC) policies. The studies were approved by the University of Washington IACUC (Protocol No. 3108-01). C57BL/6J based transgenic mice that contain the human CD46 genomic locus and provide CD46 expression at a level and in a pattern similar to humans (hCD46^{+/+} mice) were described earlier (Kemper et al., Clin Exp Immunol 124: 180-189, 2001). Transgenic mice carrying the wildtype 248 kb β-globin locus yeast artificial chromosome (β-YAC) were used (Peterson et al., Ann NY Acad Sci 850: 28-37, 1998). 13-YAC mice were crossed with human CD46^{+/+} mice to obtain p-YAC^{+/-}/CD46^{+/+} mice for in vivo HSPC transduction studies. The following primers were used for genotyping of mice: CD46 forward (SEQ ID NO: 233) and reverse (SEQ ID NO: 234); β-YAC (γ-globin promoter) forward (SEQ ID NO: 242) and reverse (SEQ ID NO: 243).

[1075] HSPC mobilization and in vivo transduction: HSPCs were mobilized in mice by subcutaneous (SC) injections of human recombinant G-CSF (5 μg/mouse/day, 4 days) followed by an SC injection of AMD3100 (5 mg/kg) on day 5. In addition, animals received Dexamethasone (10 mg/kg, IP) 16 h and 2 h before virus injection. Thirty and 60 minutes after AMD3100, animals were intravenously injected with virus vectors through the retro-orbital plexus with two doses of viruses (4×10¹⁰ vp/dose×2 doses). The base editing and SB viruses were co-delivered at a 1:1 ratio.

[1076] In vivo selection: Selection was started at one week (Townes model) or four weeks (β-YAC model) after transduction. Mice were injected with O⁶-BG (15 mg/kg, IP) two times, 30 minutes apart. One hour after the second injection of O⁶-BG, mice were injected (IP) with 5 mg/kg BCNU. At two and four weeks after the first round of selection, two more rounds were performed with BCNU doses at 7.5 and 10 mg/kg, respectively.

[1077] Secondary bone marrow transplantation: Recipients were female C57BL/6J mice, 6-8 weeks old from the Jackson Laboratory. On the day of transplantation, recipient mice were irradiated with 1000 Rad. Bone marrow cells from in vivo transduced CD46tg mice were isolated aseptically and lineage-depleted cells were isolated using MACS as described above. Six hours after irradiation cells were injected intravenously at 1×10⁶ cells per mouse. The secondary recipients were kept for 16 weeks after transplantation for terminal point analyses.

[1078] Tissue analyses: Spleen and liver tissue sections of 2.5 μm thickness were fixed in 4% formaldehyde for at least 24 hours, dehydrated and embedded in paraffin. Staining with hematoxylin-eosin was used for histological evaluation of extramedullary hemopoiesis. Hemosiderin was detected in tissue sections by Perl's Prussian blue staining. Briefly, the tissue sections were treated with a mixture of equal volumes (2%) of potassium ferrocyanide and hydrochloric acid in distilled water and then counterstained with neutral red.

[1079] Blood analyses: Blood samples were collected into EDTA-coated tubes and analysis was performed on a HemaVet 950FS (Drew Scientific, Waterbury, Conn.). Peripheral blood smears were stained with Giemsa/May-Grunwald (Merck, Darmstadt, Germany) for 5 and 15 minutes, respectively. Reticulocytes were stained with Brilliant cresyl blue. The investigators who counted the reticulocytes on blood smears have been blinded to the sample group allocation. Only animal numbers appeared on the slides (five slides per animal, five random 1 cm² sections).

[1080] Statistical analyses: For comparisons of multiple groups, one-way and two-way analysis of variance (ANOVA) with Bonferroni post-testing for multiple comparisons were employed. Statistical analysis was performed using Graph Pad Prism version 6.01 (GraphPad Software Inc., La Jolla, Calif.).

[1081] Results. Selection of base editors and guide RNAs. The editing activity of multiple versions of cytidine base editors (CBE) were compared including BE4 (Komo et al., Science Advances 3: eaao4774, 2017), AncBE4max (Koblan et al., Nature Biotechnology 36: 843-846, 2018), BE3RA and FNLS (Zafra et al., Nature Biotechnology 36: 888-893, 2018). The base editors (BEs) were subcloned and driven by an ubiquitous EF1α promoter. A second plasmid expressing guide RNA under a human U6 promoter that targets the GATAA motif in the +58 BCL11A enhancer region (Canver et al., Nature 527: 192-197, 2015) was used for co-transfection. Although the BE3RA showed higher editing in 293FT cells (FIG. 131A), the AncBE4max system demonstrated the highest activity in K562 erythroid cells measured by cleavage assay (FIG. 131B). Therefore, AncBE4max was used in downstream studies. For adenine base editor (ABE), the ABEmax system developed by David Liu group was used and optimized using a similar approach as for AncBE4max (Koblan et al., Nature Biotechnology 36: 843-846, 2018). The xCas9(3.7)-BE4 and xCas9(3.7)-ABE(7.10) editors were also used in guide sequence screening due to their broad PAM compatibility (Hu et al., Nature 556: 57-63, 2018).

[1082] The optimal targetable window of base editors is position 4-8 of the protospacer, counting the 5′ end first base as position 1. A panel of single guide RNA (sgRNA) sequences were designed specific to the GATAA motif in the +58 BCL11A enhancer (sgBCL #1 to #6) or recreating various naturally occurring Hereditary Persistence of Fetal Hemoglobin (HPFH) mutations in the HBG1/2 promoter (sgHBG #1 to #6). The sequences and their specific target motifs/bases were shown in Table 14. The guide sequences were tested in an erythroid progenitor cell line HUDEP-2 cells (Kurita et al., PloS One 8: e59890, 2013) for their potency to reactivate γ-globin expression. The cells were put into erythroid differentiation at day 4 after transfection. All 12 sgRNA sequences led to significant γ-globin expression compared to a negative CBE control that targets CCR5 expression but not hemoglobin-related genes (FIG. 130). sgHBG #2 resulted in 41% HbF⁺ cells at day 6 after differentiation. A previously described CRISPR vector targeting the BCL11A binding site in HBG promoter was used as a positive control and generated 84% of HbF⁺ cells (Li et al., Blood 131: 2915-2928, 2018). Accordingly, sgBCL #1 (CBE), sgHBG #1 (CBE), sgHBG #2 (ABE) and sgHBG #4 (ABE) were chosen for viral vector delivery in consideration of their activity as well as diversity of target sites. The negative control vector sgNeg (CBE) and a vector containing both sgHBG #1 and sgBCL #1 (Dual, CBE) were also constructed.

[1083] Generation of help-dependent adenovirus vectors (HDAd) expressing BE. Next, the aim was to produce viral vectors for efficient in vivo BE delivery. Due to the over 8 kb size of base editors with necessary regulatory elements, it is difficult to fit into one lentiviral vector (LV) or adeno-associated vector (AAV). HDAd vectors were developed with modified fiber, called HDAd5/35++, for efficient transduction of hematopoietic stem cells (HSCs) (Li et al., Mol Ther Methods Clin Dev 9: 142-152, 2018). HDAd vectors can accommodate 36 kb packaging capacity, providing ample space for BE components. In the first attempt, the BE enzyme (rAPOBEC1-nCas9-2xUGl for CBE or 2xTadA-nCas9 for ABE) was placed under an EF1a, promoter. The whole BE components including sgRNA driven by a human U6 promoter were cloned into the HDAd vector plasmid pHCA. A MGMT/GFP cassette flanked by FRT and transposon sites was also cloned to the vector to facilitate selection of transduced cells by O6BG/BCNU treatment (FIGS. 132A and 132B). Notably, the BE components were placed outside of the transposon. This design allowed for i) transient expression of the BE while maintaining integrated expression of MGMT/GFP; and ii) more rapid degradation of editing enzymes upon co-infection with another vector expressing sleepy beauty transposase (HDAd-SB) (for further discussion and/or additional illustration of certain aspects of vector design, see also Example 3). Although the yield per 3-liter spinner was relatively low (1×10¹² viral particles or vp on average), all four CBE vectors were rescued. This is in contrast to HDAd-CRISPR vectors that are not rescuable without mechanisms to regulate nuclease expression (Saydaminova et al., Mol Ther Methods Clin Dev 1: 14057, 2015). The results suggested that DSB-free BE system may be less toxic to the HDAd producer cells than CRISPR/Cas9. For the ABE vectors, the viruses appeared rearranged and no distinct HDAd band was observed after ultracentrifugation with CsCl gradient. Since the major difference between ABE and CBE vectors are the deaminase region, it was likely that the two TadA-32aa repeats in ABE vectors were the causative elements. Therefore, the following modifications were made to the first version of ABE vectors: i) the sequence repetitiveness between the two TadA-32aa repeats was further reduced by alternative codon usage (FIG. 132C); ii) A PGK promoter was used to drive the BE enzyme. While being constitutive in HSCs (Li et al., Cancer Res 80: 549-560, 2020), the PGK promoter drives lower gene expression than Ef1α in 116 producer cells (Qin et al., PloS One 5: e10611, 2010), eliminating potential TadA-associated adverse effects; iii) A miR183/218-based gene regulation system was utilized to further control BE expression (Saydaminova et al., Mol Ther Methods Clin Dev 1: 14057, 2015) (FIG. 133A). This second version of constructs with optimized design led to successful rescue of two HDAd-ABE viruses with an average yield of 3.3×10¹² vp/spinner which are within the normal yield range (FIG. 133B).

[1084] The HDAd vectors were examined next in HUDEP-2 cells. All five tested vectors efficiently installed target base conversion and led to substantial γ-globin reactivation (FIG. 133 and FIG. 134). Consistent with screening data by transient transfection, HDAd-ABE-sgHBG #2 vector induced the highest level of HbF⁺ cells (71% at MOI 1000 vp/cell). Interestingly, while sgBCL #1 and sgHBG #1 alone mediated 17% and 39% HbF⁺ cells, respectively, the Dual targeting vector simultaneously expressing sgBCL #1 and sgHBG #1 generated HbF induction at a level comparable to that of sgHBG #2 (FIG. 133C), indicating a synergistic effect. No significant HbF induction was measured for the negative control vector. γ-globin protein levels measured by HPLC were consistent with flow cytometry data. 23% of human γ-globin over human β-globin was observed following transduction with sgHBG #2, demonstrating significant switching (FIGS. 133E and 133H). At MOI 1000, base conversion frequencies for the four sgRNAs were in the range of 25-51% (FIG. 133D and FIG. 134A). For sgHBG #2, 40% and 34% A >G conversion at position 5 and 8 was detected, respectively (FIG. 133D). The As to G conversion simulated -113A >G HPFH mutation (Table 14) (Martyn et al., Blood 133(8):852-856, 2019). No significant editing difference was found between HBG1 and HBG2. In single-cell derived clones, monoallelic edits at A₅ and A₈ sites conferred 100% of HbF-positive cells (FIGS. 133F and 133G), confirming the critical role of these sites in regulating HbF suppression. Similar results were shown in clones derived from sgHBG #1 and sgHBG #4. In clones transduced with sgBCL #1, a biallelic G >A mutation in the GATAA motif of BCL11A enhancer led to 15% HbF-expressing cells (FIGS. 134B and 134C). Collectively, these data demonstrate that HDAd-BE vectors specific to critical sites in the BCL11A enhancer or HBG1/2 promoter can efficiently reactivate HbF expression.

[1085] Reactivation of γ-globin in β-YAC mice following in vivo transduction with base editors. A simplified gene therapy approach was established by in vivo transduction of HSCs with HDAd5/35++vectors (Richter et al., Blood 128: 2206-2217, 2016). Therefore, the efficacy of base editing with this novel in vivo strategy was investigated. β-YAC mice were used that contain a 248 kb of human DNA including the complete 82 kb β-globin locus (Peterson et al., PNAS USA 90: 7593-7597, 1993). The mice were crossed with human CD46 transgenic mice to allow for transduction with HDAd5/35++ vectors. The HDAd-ABE-sgHBG #2 was selected due to its highest efficacy to induce γ-globin expression in HUDEP-2 cells. Following mobilization with G-CSF/Plerixafor, β-YAC/CD46 mice were intravenously injected with HDAd-ABE-sgHBG #2 and HDAd-SB vectors. Four weeks after transduction, mice were subjected to four rounds of O⁶BG/BCNU (O⁶-Benzylguanine/Carmustine) treatment to selectively expand progenitors with integrated MGMT-GFP transgenes (FIG. 135A). After selection, the GFP marking in PBMCs reached 60% (FIGS. 135B and 135C). Notably, γ-globin expression in peripheral blood cells was raised from 1% before transduction to 43% on average (n=9) at week 16 after transduction, demonstrating significant γ-globin reactivation (FIGS. 135D and 135E). The large variation existed among different mice was probably caused by the bicistronic design of MGMT-2A-GFP that might result in lower expression of MGMT and therefore affected in vivo selection efficacy. γ-globin⁺ cells largely resided in the red blood cell (RBC) fraction (Ter-119+) in both blood at bone marrow samples (FIG. 135F). In RBC lysate at week 16, up to 21% of γ-globin over human β-globin protein was measured by high performance liquid chromatography (HPLC) (FIG. 135G and FIG. 136). γ-globin mRNA expression was in line with HPLC data (FIG. 135H). In total bone marrow mononuclear cells at week 16, the integrated vector copy number was up to 2.5 copies/cell (1.4 on average) (FIG. 135I).

[1086] Base edits in the HBG1/2 promoter were analyzed. The A >G conversion frequencies at A₅ and A₈ sites in HBG1 and HBG2 were on average 15-30% (FIGS. 137A-137C). The base editing frequency was found to be tightly correlated with the level of γ-globin expression (Pearson test, R=0.92, p<0.001) (FIG. 137D). In the mouse with highest γ-globin expression, 82% target base conversion was achieved (FIG. 137B). Of note, there was a tendency that the conversion % at A₅ was slightly higher than that at A₈ site in both HBG1 and HBG2 regions, though no statistical difference was found (FIG. 137B). It has been showed that some base editors exhibit processive editing when multiple targets present in the protospacer. However, no editing was found at the A₉ site (FIGS. 137A and 137C). This was likely because position 9 is located outside of the optimal editing window, demonstrating the narrowness of editable window.

[1087] In summary, these data demonstrate that in vivo transduction with base editors specific to the HBG1/2 promoter followed by selection leads to efficient target base conversion and γ-globin reactivation in β-YAC/CD46 mice.

[1088] Good safety profile and stable efficacy after in vivo HSC base editing. At week 16, the animals were euthanized and tissue samples were subjected to multiple hematology and histology analyses. Hematological parameters, including white blood cells (K/μL), red blood cells (M/μL), Hb (g/dL), MCV (fL), MCHC (g/dL), RDW (%) and platelets (K/μL), were similar to that of naïve β-YAC/CD46 mice (FIGS. 138A and 138B). The percentage of reticulocytes in peripheral blood measured by Brilliant cresyl blue staining was comparable to mice without treatment (FIG. 138D). No foci of extramedullary erythropoiesis were observed on spleen and liver sections. The cellular composition in PBMCs, spleen and bone marrow mononuclear cells was revealed to be indistinguishable from control mice (FIG. 138C). Besides, compared to other previously reported gene therapy vectors (Li et al., Blood 131: 2915-2928, 2018; Wang et al., J Clin Invest. 129(2): 598-615, 2018; Li et al., Molecular Therapy 27: 2195-2212, 2019), HDAd-ABE-sgHBG #2 did not cause obvious change of body weight, behavior and appearance after in vivo transduction/selection.

[1089] To demonstrate that in vivo transduction occurred in long-term repopulating HSPCs, bone marrow lineage minus (Lin⁻) cells harvested at week 16 were transplanted after transduction into lethally irradiated C57BL/6J mice (without the human CD46 gene). The ability of transplanted cells to drive the multi-lineage reconstitution in secondary recipients was evaluated over a period of 16 weeks. Engraftment rates based on huCD46 expression in PBMCs were over 95% and remained stable (FIG. 139A). GFP marking of PMBCs was comparable to that in primary mice (FIG. 139B). The percent of γ-globin⁺ RBCs was on average 40% and stable (FIG. 139C).

[1090] These observations together demonstrated that in vivo HSC base editing was overall safe. The modified HSPCs persisted long term and were capable of reconstituting secondary recipient mice with stable transgene expression.

[1091] Minimal intergenic deletion and no detectable editing at top-scored off-target sites. A trade-off of DSB-dependent gene editing strategies is potential genomic large-fragment deletion (Kosicki et al., Nature Biotechnology 36: 765, 2018). In the case of targeting HBG1/2 promoters by DSB-generating nucleases, this side effect may become more significant due to the high similarity between the HBG1 and HBG2 regions. Guide sequences specific to one of the two regions may also target the other one. It has been reported that targeting the BCL11A binding sites in HBG1/2 promoters with CRISPR/Cas9 leads to a 4.9 kb intergenic deletion (Traxler et al., Nature Medicine 22: 987-990, 2016; Li et al., Blood 131: 2915-2928, 2018). As a result, the whole HBG2 gene is removed. Therefore, the genomic deletion by a semi-quantitative PCR was looked into (Li et al., Blood 131: 2915-2928, 2018). A pair of primers flanking the two targeting sites was used to amplify a 9.9 kb genomic segment. The presence of 4.9 kb deletion would generate an extra shortened 5.0 kb PCR amplicon. The percentage of deletion was positively correlated with the ratio of 5.0 kb to 9.9 kb amplicons by establishing a standard curve (see FIG. 7C in Li et al., Blood 131: 2915-2928, 2018). It was found that the average 4.9 kb deletion in base editor-treated mice was below 1% (FIG. 140). In some mice, it was barely detectable. This was significantly lower than that derived from transduction with an HDAd-HBG-CRISPR vector (Li et al., Blood 131: 2915-2928, 2018).

[1092] Next, off-target analyses was conducted to examine the fidelity of the system. In silico analysis showed no potential off-target sites with ≤5. 2 base pairs (bp) mismatches to the guide sequence in both human and mice genome. There were 10 and 2 potential off-targets with 3 bp mismatches in human and mice, respectively. It was speculated that the likelihood of off-target editing at these predicted targets was low because all the sites bear at least 1 bp mismatch in the PAM-proximal half of the protospacer. With 4 bp mismatches, 79 and 74 potential targets in human and mice, respectively, were returned. Since the study was performed in mice, 10 top-scored genomic sites (two with 3 bp mismatches; seven with 4 bp mismatches) were amplified from mice with highest on-target base installation followed by Sanger sequencing. None of these sites exhibited detectable editing.

[1093] Collectively, these data provided evidence for minimal intergenic deletion and high fidelity of the in vivo base editing system.

### Example 11. Further Description Regarding Base Editor Embodiments

[1094] FIG. 141 presents the safety profile of a base editor, including hematology analysis (FIG. 141A) and cellular comparison in bone marrow MNCs (FIG. 141B). An illustration of editing expected to result from activity of base editor BE4-sgBCL11AE1 is shown in FIG. 142. FIG. 143 shows an optimal protospacer sequence arrangement for maximizing base editing efficiency when effecting C to T (top image) or G to A (bottom image) base transformations. FIG. 144 shows a vector for C to T editing when the target C is in positions 4 through 8 within the protospacer. FIG. 145 shows a diagram of viral gDNA (HBG2-miR, adenine editor) which represents a single contiguous construct but has been divided into two sections solely for ease of presentation. FIG. 146 shows sequences of TadA and TadA*. Sanger sequencing was performed to confirm base editing of sequences (FIG. 147). FIG. 148 shows base editing by an HDAd5/35++_BE4-sgBCL11Ae1-Fl-mgmtGFP (041318-1) virus, and FIG. 149 shows the percentage of γ-globin⁺ cells at indicated MOIs. FIG. 150 shows cytidine base editors and adenine base editors for reactivation of HbF by base editing. FIG. 151 shows exemplary base editors and percent HbF+ cells at various MOIs of the base editors. FIG. 152 shows the % HbF+from a second trial in HUDEP-2 cells. FIG. 153 shows results in single-cell derived clones. FIGS. 154A-154S, show data representing individual single-cell derived clones. Base editors were also tested in 293FT cells (FIG. 155). FIGS. 156A-156D, show sanger sequencing results. Base editors were also tested in HUDEP-2 cells (FIG. 157). Expression of γ-globin is shown in FIG. 158. FIGS. 159A-159D, show sanger sequencing results, where available. Constructs were selected for Maxi preparation as shown in FIG. 160.

[1095] Engraftment of huCD45+ cells edited, e.g., with HDAd-AAVSI-CRISPR or HDAd-globin-BE4 base editor are shown in FIG. 161.

[1096] Transient transfection of HUDEP-2 cells (with cleavage by T7EI) is shown in FIG. 162.

[1097] Non-limiting examples of base editing constructs for HbF could include (1) pHCA-ABEmax-sgHBG2-miR-FI-mgmtGFP; (2) pHCA-ABEmax-sgHBG4-miR-FI-mgmtGFP; or (3) pHCA-ABEmax-Dual-Skip-miR-FI-mgmtGFP.

[1098] At least one application of base editors includes dual base editing vectors, which application is exemplified in FIG. 163.

[1099] In single-cell derived clones, monoallelic or biallelic target base conversion conferred 100% of HbF-positive cells. 60%-113 A to G HPFH mutation in HBG1/2 promoter of mixed HUDEP-2 cells was observed using an ABE vector HDAd-ABE-HBG #2 (see FIG. 135). This vector was chosen for certain further animal studies. Animal studies were carried out in mice that carry 248 kb of the human β-globin locus (β-YAC mice) and thus accurately reflect globin switching (see, e.g., FIG. 137). An EF1α-mgmt^{P140K} expression cassette flanked by FRT and transposon sites was included in the vector for allowing in vivo selection of transduced cells (see, e.g., FIG. 136). After in vivo transduction with HDAd-ABE-HBG #2+HDAd-SB and selection with low doses of O⁶BG/BCNU, an average of 35% of HbF-positive cells was measured in peripheral red blood cells (FIG. 138). In one out of eight mice, a near complete-113 A to G conversion and 90% of HbF-positive cells were achieved. No alterations in blood cell counts were found (FIG. 141). The cellular composition of bone marrow samples was comparable to that of untransduced mice, demonstrating a good safety profile (FIG. 141). Bone marrow lineage minus cells were isolated from primary mice at week 14 after transduction and infused into lethally irradiated C57BL/6J mice. The percentage of HbF-positive cells was maintained in secondary recipients over 16 weeks indicating genome editing occurred in long-term repopulating mouse HSCs. These observations demonstrate that base editors delivered by HDAd5/35++ vectors in vivo are a strategy for precise genome engineering, e.g., for the treatment of hemoglobinopathies.

### VII. CLOSING PARAGRAPHS

[1100] Variants of the sequences disclosed and referenced herein are also included. Guidance in determining which amino acid residues can be substituted, inserted, or deleted without abolishing biological activity can be found using computer programs well known in the art, such as DNASTAR™ (Madison, Wis.) software. Preferably, amino acid changes in the protein variants disclosed herein are conservative amino acid changes, i.e., substitutions of similarly charged or uncharged amino acids. A conservative amino acid change involves substitution of one of a family of amino acids which are related in their side chains.

[1101] In a peptide or protein, suitable conservative substitutions of amino acids are known to those of skill in this art and generally can be made without altering a biological activity of a resulting molecule. Those of skill in this art recognize that, in general, single amino acid substitutions in non-essential regions of a polypeptide do not substantially alter biological activity (see, e.g., Watson et al., Molecular Biology of the Gene, 4th Edition, 1987, The Benjamin/Cummings Pub. Co., p. 224). Naturally occurring amino acids are generally divided into conservative substitution families as follows: Group 1: Alanine (Ala), Glycine (Gly), Serine (Ser), and Threonine (Thr); Group 2: (acidic): Aspartic acid (Asp), and Glutamic acid (Glu); Group 3: (acidic; also classified as polar, negatively charged residues and their amides): Asparagine (Asn), Glutamine (Gin), Asp, and Glu; Group 4: Gln and Asn; Group 5: (basic; also classified as polar, positively charged residues): Arginine (Arg), Lysine (Lys), and Histidine (His); Group 6 (large aliphatic, nonpolar residues): Isoleucine (Ile), Leucine (Leu), Methionine (Met), Valine (Val) and Cysteine (Cys); Group 7 (uncharged polar): Tyrosine (Tyr), Gly, Asn, Gln, Cys, Ser, and Thr; Group 8 (large aromatic residues): Phenylalanine (Phe), Tryptophan (Trp), and Tyr; Group 9 (non-polar): Proline (Pro), Ala, Val, Leu, Ile, Phe, Met, and Trp; Group 11 (aliphatic): Gly, Ala, Val, Leu, and Ile; Group 10 (small aliphatic, nonpolar or slightly polar residues): Ala, Ser, Thr, Pro, and Gly; and Group 12 (sulfur-containing): Met and Cys. Additional information can be found in Creighton (1984) Proteins, W.H. Freeman and Company.

[1102] In making such changes, the hydropathic index of amino acids may be considered. The importance of the hydropathic amino acid index in conferring interactive biologic function on a protein is generally understood in the art (Kyte & Doolittle, J. Mol. Biol. 157(1), 105-32, 1982). Each amino acid has been assigned a hydropathic index on the basis of its hydrophobicity and charge characteristics (Kyte and Doolittle, 1982). These values are: Ile (+4.5); Val (+4.2); Leu (+3.8); Phe (+2.8); Cys (+2.5); Met (+1.9); Ala (+1.8); Gly (−0.4); Thr (−0.7); Ser (−0.8); Trp (−0.9); Tyr (−1.3); Pro (−1.6); His (−3.2); Glutamate (−3.5); Gln (−3.5); aspartate (−3.5); Asn (−3.5); Lys (−3.9); and Arg (−4.5).

[1103] It is known in the art that certain amino acids may be substituted by other amino acids having a similar hydropathic index or score and still result in a protein with similar biological activity, i.e., still obtain a biological functionally equivalent protein. In making such changes, the substitution of amino acids whose hydropathic indices are within ±2 is preferred, those within ±1 are particularly preferred, and those within ±0.5 are even more particularly preferred. It is also understood in the art that the substitution of like amino acids can be made effectively on the basis of hydrophilicity.

[1104] As detailed in U.S. Pat. No. 4,554,101, the following hydrophilicity values have been assigned to amino acid residues: Arg (+3.0); Lys (+3.0); aspartate (+3.0±1); glutamate (+3.0±1); Ser (+0.3); Asn (+0.2); Gln (+0.2); Gly (0); Thr (−0.4); Pro (−0.5±1); Ala (−0.5); His (−0.5); Cys (−1.0); Met (−1.3); Val (−1.5); Leu (−1.8); Ile (−1.8); Tyr (−2.3); Phe (−2.5); Trp (−3.4). It is understood that an amino acid can be substituted for another having a similar hydrophilicity value and still obtain a biologically equivalent, and in particular, an immunologically equivalent protein. In such changes, the substitution of amino acids whose hydrophilicity values are within ±2 is preferred, those within ±1 are particularly preferred, and those within ±0.5 are even more particularly preferred.

[1105] As outlined above, amino acid substitutions may be based on the relative similarity of the amino acid side-chain substituents, for example, their hydrophobicity, hydrophilicity, charge, size, and the like.

[1106] As indicated elsewhere, variants of gene sequences can include codon optimized variants, sequence polymorphisms, splice variants, and/or mutations that do not affect the function of an encoded product to a statistically-significant degree.

[1107] Variants of the protein, nucleic acid, and gene sequences disclosed herein also include sequences with at least 70% sequence identity, 80% sequence identity, 85% sequence, 90% sequence identity, 95% sequence identity, 96% sequence identity, 97% sequence identity, 98% sequence identity, or 99% sequence identity to the protein, nucleic acid, or gene sequences disclosed herein.

[1108] “% sequence identity” refers to a relationship between two or more sequences, as determined by comparing the sequences. In the art, “identity” also means the degree of sequence relatedness between protein, nucleic acid, or gene sequences as determined by the match between strings of such sequences. “Identity” (often referred to as “similarity”) can be readily calculated by known methods, including those described in: Computational Molecular Biology (Lesk, A. M., ed.) Oxford University Press, N Y (1988); Biocomputing: Informatics and Genome Projects (Smith, D. W., ed.) Academic Press, N Y (1994); Computer Analysis of Sequence Data, Part I (Griffin, A. M., and Griffin, H. G., eds.) Humana Press, N J (1994); Sequence Analysis in Molecular Biology (Von Heijne, G., ed.) Academic Press (1987); and Sequence Analysis Primer (Gribskov, M. and Devereux, J., eds.) Oxford University Press, NY (1992). Preferred methods to determine identity are designed to give the best match between the sequences tested. Methods to determine identity and similarity are codified in publicly available computer programs. Sequence alignments and percent identity calculations may be performed using the Megalign program of the LASERGENE bioinformatics computing suite (DNASTAR, Inc., Madison, Wis.). Multiple alignment of the sequences can also be performed using the Clustal method of alignment (Higgins and Sharp CABIOS, 5, 151-153 (1989) with default parameters (GAP PENALTY=10, GAP LENGTH PENALTY=10). Relevant programs also include the GCG suite of programs (Wisconsin Package Version 9.0, Genetics Computer Group (GCG), Madison, Wis.); BLASTP, BLASTN, BLASTX (Altschul, et al., J. Mol. Biol. 215:403-410 (1990); DNASTAR (DNASTAR, Inc., Madison, Wis.); and the FASTA program incorporating the Smith-Waterman algorithm (Pearson, Comput. Methods Genome Res., [Proc. Int. Symp.] (1994), Meeting Date 1992, 111-20. Editor(s): Suhai, Sandor. Publisher: Plenum, New York, N.Y. Within the context of this disclosure it will be understood that where sequence analysis software is used for analysis, the results of the analysis are based on the “default values” of the program referenced. As used herein “default values” will mean any set of values or parameters, which originally load with the software when first initialized.

[1109] Variants also include nucleic acid molecules that hybridizes under stringent hybridization conditions to a sequence disclosed herein and provide the same function as the reference sequence. Exemplary stringent hybridization conditions include an overnight incubation at 42° C. in a solution including 50% formamide, 5×SSC (750 mM NaCl, 75 mM trisodium citrate), 50 mM sodium phosphate (pH 7.6), 5×Denhardt's solution, 10% dextran sulfate, and 20 μg/ml denatured, sheared salmon sperm DNA, followed by washing the filters in 0.1×SSC at 50° C. Changes in the stringency of hybridization and signal detection are primarily accomplished through the manipulation of formamide concentration (lower percentages of formamide result in lowered stringency); salt conditions, or temperature. For example, moderately high stringency conditions include an overnight incubation at 37° C. in a solution including 6×SSPE (20×SSPE=3M NaCl; 0.2 M NaH₂PO₄; 0.02 M EDTA, pH 7.4), 0.5% SDS, 30% formamide, 100 μg/ml salmon sperm blocking DNA; followed by washes at 50° C. with 1×SSPE, 0.1% SDS. In addition, to achieve even lower stringency, washes performed following stringent hybridization can be done at higher salt concentrations (e.g. 5×SSC). Variations in the above conditions may be accomplished through the inclusion and/or substitution of alternate blocking reagents used to suppress background in hybridization experiments. Typical blocking reagents include Denhardt's reagent, BLOTTO, heparin, denatured salmon sperm DNA, and commercially available proprietary formulations. The inclusion of specific blocking reagents may require modification of the hybridization conditions described above, due to problems with compatibility.

[1110] “Specifically binds” refers to an association of a binding domain (of, for example, a CAR binding domain or a nanoparticle selected cell targeting ligand) to its cognate binding molecule with an affinity or Ka (i.e., an equilibrium association constant of a particular binding interaction with units of 1/M) equal to or greater than 10⁵ M⁻¹, while not significantly associating with any other molecules or components in a relevant environment sample. “Specifically binds” is also referred to as “binds” herein. Binding domains may be classified as “high affinity” or “low affinity”. In particular embodiments, “high affinity” binding domains refer to those binding domains with a Ka of at least 10⁷ M⁻¹, at least 10⁸ M⁻¹, at least 10⁹ M⁻¹, at least 10¹⁰ M⁻¹, at least 10¹¹ M⁻¹, at least 10¹² M⁻¹, or at least 10¹³ M⁻¹. In particular embodiments, “low affinity” binding domains refer to those binding domains with a Ka of up to 10⁷ M⁻¹, up to 10⁶ M⁻¹, up to 10⁵ M⁻¹. Alternatively, affinity may be defined as an equilibrium dissociation constant (Kd) of a particular binding interaction with units of M (e.g., 10⁻⁵ M to 10⁻¹³ M). In certain embodiments, a binding domain may have “enhanced affinity,” which refers to a selected or engineered binding domains with stronger binding to a cognate binding molecule than a wild type (or parent) binding domain. For example, enhanced affinity may be due to a Ka (equilibrium association constant) for the cognate binding molecule that is higher than the reference binding domain or due to a Kd (dissociation constant) for the cognate binding molecule that is less than that of the reference binding domain, or due to an off-rate (K_{off}) for the cognate binding molecule that is less than that of the reference binding domain. A variety of assays are known for detecting binding domains that specifically bind a particular cognate binding molecule as well as determining binding affinities, such as Western blot, ELISA, and BIACORE® analysis (see also, e.g., Scatchard, et al., 1949, Ann. N.Y. Acad. Sci. 51:660; and U.S. Pat. Nos. 5,283,173, 5,468,614, or the equivalent).

[1111] Unless otherwise indicated, the practice of the present disclosure can employ conventional techniques of immunology, molecular biology, microbiology, cell biology and recombinant DNA. These methods are described in the following publications. See, e.g., Sambrook, et al., Molecular Cloning: A Laboratory Manual, 2nd Edition (1989); F. M. Ausubel, et al., eds., Current Protocols in Molecular Biology, (1987); the series Methods IN Enzymology (Academic Press, Inc.); M. MacPherson, et al., PCR: A Practical Approach, IRL Press at Oxford University Press (1991); MacPherson et al., eds. PCR 2: Practical Approach, (1995); Harlow and Lane, eds. Antibodies, A Laboratory Manual, (1988); and R. I. Freshney, ed. Animal Cell Culture (1987).

[1112] As will be understood by one of ordinary skill in the art, each embodiment disclosed herein can comprise, consist essentially of or consist of its particular stated element, step, ingredient or component. Thus, the terms “include” or “including” should be interpreted to recite: “comprise, consist of, or consist essentially of.” The transition term “comprise” or “comprises” means includes, but is not limited to, and allows for the inclusion of unspecified elements, steps, ingredients, or components, even in major amounts. The transitional phrase “consisting of” excludes any element, step, ingredient or component not specified. The transition phrase “consisting essentially of” limits the scope of the embodiment to the specified elements, steps, ingredients or components and to those that do not materially affect the embodiment. A material effect would cause a statistically significant reduction in the ability to obtain a claimed effect according to a relevant experimental method described in the current disclosure.

[1113] Unless otherwise indicated, all numbers expressing quantities of ingredients, properties such as molecular weight, reaction conditions, and so forth used in the specification and claims are to be understood as being modified in all instances by the term “about.” Accordingly, unless indicated to the contrary, the numerical parameters set forth in the specification and attached claims are approximations that may vary depending upon the desired properties sought to be obtained by the present invention. At the very least, and not as an attempt to limit the application of the doctrine of equivalents to the scope of the claims, each numerical parameter should at least be construed in light of the number of reported significant digits and by applying ordinary rounding techniques. When further clarity is required, the terms “about” and “approximately” are used interchangeably herein and have the meaning reasonably ascribed by a person skilled in the art when used in conjunction with a stated numerical value or range, i.e. denoting somewhat more or somewhat less than the stated value or range, to within a range of ±20% of the stated value; ±19% of the stated value; ±18% of the stated value; ±17% of the stated value; ±16% of the stated value; ±15% of the stated value; ±14% of the stated value; ±13% of the stated value; ±12% of the stated value; ±11% of the stated value; ±10% of the stated value; ±9% of the stated value; ±8% of the stated value; ±7% of the stated value; ±6% of the stated value; ±5% of the stated value; ±4% of the stated value; ±3% of the stated value; ±2% of the stated value; or ±1% of the stated value.

[1114] Notwithstanding that the numerical ranges and parameters setting forth the broad scope of the invention are approximations, the numerical values set forth in the specific examples are reported as precisely as possible. Any numerical value, however, inherently contains certain errors necessarily resulting from the standard deviation found in their respective testing measurements.

[1115] Recitation of ranges of values herein is merely intended to serve as a shorthand method of referring individually to each separate value falling within the range. Unless otherwise indicated herein, each individual value is incorporated into the specification as if it were individually recited herein. All methods described herein can be performed in any suitable order unless otherwise indicated herein or otherwise clearly contradicted by context. The use of any and all examples, or exemplary language (e.g., “such as”) provided herein is intended merely to better illuminate the invention and does not pose a limitation on the scope of the invention otherwise claimed. No language in the specification should be construed as indicating any non-claimed element essential to the practice of the invention.

[1116] Groupings of alternative elements or embodiments of the invention disclosed herein are not to be construed as limitations. Each group member may be referred to and claimed individually or in any combination with other members of the group or other elements found herein. It is anticipated that one or more members of a group may be included in, or deleted from, a group for reasons of convenience and/or patentability. When any such inclusion or deletion occurs, the specification is deemed to contain the group as modified thus fulfilling the written description of all Markush groups used in the appended claims.

[1117] Certain embodiments of this invention are described herein, including the best mode known to the inventors for carrying out the invention. Of course, variations on these described embodiments will become apparent to those of ordinary skill in the art upon reading the foregoing description. The inventor expects skilled artisans to employ such variations as appropriate, and the inventors intend for the invention to be practiced otherwise than specifically described herein. Accordingly, this invention includes all modifications and equivalents of the subject matter recited in the claims appended hereto as permitted by applicable law. Moreover, any combination of the above-described elements in all possible variations thereof is encompassed by the invention unless otherwise indicated herein or otherwise clearly contradicted by context.

[1118] Furthermore, numerous references have been made to patents, printed publications, journal articles and other written text throughout this specification (referenced materials herein). Each of the referenced materials are individually incorporated herein by reference in its entirety for their referenced teaching. Where referenced materials are subject to revision over time (e.g., sequence database entries and the like), the content in that reference is incorporated as of the date the reference was included in a filing in the priority claim for this application.

[1119] In closing, it is to be understood that the embodiments of the invention disclosed herein are illustrative of the principles of the present invention. Other modifications that may be employed are within the scope of the invention. Thus, by way of example, but not of limitation, alternative configurations of the present invention may be utilized in accordance with the teachings herein. Accordingly, the present invention is not limited to that precisely as shown and described.

[1120] The particulars shown herein are by way of example and for purposes of illustrative discussion of the preferred embodiments of the present invention only and are presented in the cause of providing what is believed to be the most useful and readily understood description of the principles and conceptual aspects of various embodiments of the invention. In this regard, no attempt is made to show structural details of the invention in more detail than is necessary for the fundamental understanding of the invention, the description taken with the drawings and/or examples making apparent to those skilled in the art how the several forms of the invention may be embodied in practice.

[1121] Definitions and explanations used in the present disclosure are meant and intended to be controlling in any future construction unless clearly and unambiguously modified in the examples or when application of the meaning renders any construction meaningless or essentially meaningless. In cases where the construction of the term would render it meaningless or essentially meaningless, the definition should be taken from Webster's Dictionary, 3rd Edition or a dictionary known to those of ordinary skill in the art, such as the Oxford Dictionary of Biochemistry and Molecular Biology (Eds. Attwood T et al., Oxford University Press, Oxford, 2006).

What is claimed is:

1. A recombinant adenoviral serotype 35 (Ad35) vector production system comprising:
a recombinant Ad35 helper genome comprising:
a nucleic acid sequence encoding an Ad35 fiber shaft;
a nucleic acid sequence encoding an Ad35 fiber knob; and
recombinase direct repeats (DRs) flanking at least a portion of an Ad35 packaging sequence, and
a recombinant helper dependent Ad35 donor genome comprising:
a 5′ Ad35 inverted terminal repeat (ITR);
a 3′ Ad35 ITR;
an Ad35 packaging sequence; and
a nucleic acid sequence encoding at least one heterologous expression product.

2. A recombinant adenoviral serotype 35 (Ad35) helper vector comprising:
an Ad35 fiber shaft;
an Ad35 fiber knob; and
an Ad35 genome comprising recombinase direct repeats (DRs) flanking at least a portion of an Ad35 packaging sequence.

3. A recombinant adenoviral serotype 35 (Ad35) helper genome comprising:
a nucleic acid sequence encoding an Ad35 fiber shaft;
a nucleic acid sequence encoding an Ad35 fiber knob; and
recombinase direct repeats (DRs) flanking at least a portion of an Ad35 packaging sequence.

4. A recombinant helper dependent adenoviral serotype 35 (Ad35) donor vector comprising:
a nucleic acid sequence comprising
a 5′ Ad35 inverted terminal repeat (ITR);
a 3′ Ad35 ITR;
an Ad35 packaging sequence; and
a nucleic acid sequence encoding at least one heterologous expression product,
wherein the genome does not comprise a nucleic acid sequence encoding an Ad35 viral structural protein; and
an Ad35 fiber shaft and/or an Ad35 fiber knob.

5. A recombinant helper dependent adenoviral serotype 35 (Ad35) donor genome comprising:
a 5′ Ad35 inverted terminal repeat (ITR);
a 3′ Ad35 ITR;
an Ad35 packaging sequence; and
a nucleic acid sequence encoding at least one heterologous expression product, wherein the Ad35 donor genome does not comprise a nucleic acid sequence encoding an expression product encoded by the wild-type Ad35 genome.

6. A method of producing a recombinant helper dependent adenoviral serotype 35 (Ad35) donor vector, the method comprising isolating the recombinant helper dependent Ad35 donor vector from a culture of cells, wherein the cells comprise:
a recombinant Ad35 helper genome comprising:
a nucleic acid sequence encoding an Ad35 fiber shaft;
a nucleic acid sequence encoding an Ad35 fiber knob; and
recombinase direct repeats (DRs) flanking at least a portion of an Ad35 packaging sequence, and
a recombinant helper dependent Ad35 donor genome comprising:
a 5′ Ad35 inverted terminal repeat (ITR);
a 3′ Ad35 ITR;
an Ad35 packaging sequence; and
a nucleic acid sequence encoding at least one heterologous expression product.

7. A recombinant adenoviral serotype 35 (Ad35) production system comprising:
a recombinant Ad35 helper genome comprising:
a nucleic acid sequence encoding an Ad35 fiber shaft;
a nucleic acid sequence encoding an Ad35 fiber knob; and
recombinase direct repeats (DRs) within 550 nucleotides of the 5′ end of the Ad35 genome that functionally disrupt the Ad35 packaging signal but not the 5′ Ad35 inverted terminal repeat (ITR), and
a recombinant Ad35 donor genome comprising:
a 5′ Ad35 ITR;
a 3′ Ad35 ITR;
an Ad35 packaging sequence; and
a nucleic acid sequence encoding at least one heterologous expression product.

8. A recombinant adenoviral serotype 35 (Ad35) helper vector comprising:
an Ad35 fiber shaft;
an Ad35 fiber knob; and
an Ad35 genome comprising recombinase direct repeats (DRs) within 550 nucleotides of the 5′ end of the Ad35 genome that functionally disrupt the Ad35 packaging signal but not the 5′ Ad35 inverted terminal repeat (ITR).

9. A recombinant adenoviral serotype 35 (Ad35) helper genome comprising:
a nucleic acid sequence encoding an Ad35 fiber shaft;
a nucleic acid sequence encoding an Ad35 fiber knob; and
recombinase direct repeats (DRs) within 550 nucleotides of the 5′ end of the Ad35 genome that functionally disrupt the Ad35 packaging signal but not the 5′ Ad35 inverted terminal repeat (ITR).

10. A method of producing a recombinant helper dependent adenoviral serotype 35 (Ad35) donor vector, the method comprising isolating the recombinant helper dependent Ad35 donor vector from a culture of cells, wherein the cells comprise:
a recombinant Ad35 helper genome comprising:
a nucleic acid sequence encoding an Ad35 fiber shaft;
a nucleic acid sequence encoding an Ad35 fiber knob; and
recombinase direct repeats (DRs) within 550 nucleotides of the 5′ end of the Ad35 genome that functionally disrupt the Ad35 packaging signal but not the 5′ Ad35 inverted terminal repeat (ITR), and
a recombinant Ad35 donor genome comprising:
a 5′ Ad35 ITR;
a 3′ Ad35 ITR;
an Ad35 packaging sequence; and
a nucleic acid sequence encoding at least one heterologous expression product.

11. The recombinant Ad35 vector production system, helper vector, helper genome, donor vector, or method of any one of claim 1-4 or 6-10, wherein:
the Ad35 fiber knob is a wild-type Ad35 fiber knob, or
the Ad35 fiber knob is an engineered Ad35 fiber knob, wherein the engineered fiber knob comprises a mutation that increases affinity of the fiber knob with CD46.

12. The recombinant Ad35 vector production system, helper vector, helper genome, donor vector, or method of claim 11, wherein the mutation:
comprises a mutation selected from Ile192Val, Asp207Gly (or Glu207Gly), Asn217Asp, Thr226Ala, Thr245Ala, Thr254Pro, Ile256Leu, Ile256Val, Arg259Cys, and Arg279His; or comprises each of mutations Ile192Val, Asp207Gly (or Glu207Gly), Asn217Asp, Thr226Ala, Thr245Ala, Thr254Pro, Ile256Leu, Ile256Val, Arg259Cys, and Arg279His.

13. The recombinant Ad35 vector production system, donor genome, donor vector, or method of any one of claim 1, 4-7, or 10, wherein the heterologous expression product comprises a therapeutic expression product operably linked with a regulatory sequence, optionally wherein the therapeutic expression product comprises:
(a) a β-globin protein or γ-globin protein;
(b) an antibody or an immunoglobulin chain thereof, optionally wherein the antibody is an anti-CD33 antibody;
(c) a first antibody or an immunoglobulin chain thereof and a second antibody or an immunoglobulin chain thereof, optionally wherein the antibody is an anti-CD33 antibody;
(d) a CRISPR-associated RNA-guided endonuclease and/or a guide RNA (gRNA), optionally wherein the CRISPR-associated RNA-guided endonuclease comprises Cas9 or cpf1;
(e) a base editor and/or a gRNA, optionally wherein the base editor is a cytosine base editor (CBE) or adenine base editor (ABE), optionally wherein the base editor comprises a catalytically disabled nuclease selected from a disabled Cas9 and a disabled cpf1;
(f) a coagulation factor or a protein that blocks or reduces viral infection, optionally wherein the therapeutic expression produce comprises a Factor VII replacement protein or a Factor VIII replacement protein;
(g) a checkpoint inhibitor;
(h) chimeric antigen receptor or engineered T cell receptor; or
(i) a protein selected from the group consisting of γC, JAK3, IL7RA, RAG1, RAG2, DCLRE1C, PRKDC, LIG4, NHEJ1, CD3D, CD3E, CD3Z, CD3G, PTPRC, ZAP70, LCK, AK2, ADA, PNP, WHN, CHD7, ORAI1, STIM1, CORO1A, CIITA, RFXANK, RFX5, RFXAP, RMRP, DKC1, TERT, TINF2, DCLRE1B, SLC46A1, FancA, FancB, FancC, FancD1, FancD2, FancE, FancF, FancG, Fancl, FancJ, FancL, FancM, FancN, FancO, FancP, FancQ, FancR, FancS, FancT, FancU, FancV, FancW, soluble CD40, CTLA, Fas L, an antibody to PD-L1, an antibody to CD4, an antibody to CD5, an antibody to CD7, an antibody to CD52, an antibody to IL-1, an antibody to IL-2, an antibody to IL-4, an antibody to IL-6, an antibody to IL-10, an antibody to TNF, an antibody to a TCR specifically present on autoreactive T cells, a globin family gene, WAS, phox, dystrophin, pyruvate kinase, CLN3, ABCD1, arylsulfatase A, SFTPB, SFTPC, NLX2.1, ABCA3, GATA1, a ribosomal protein gene, TERT, TERC, DKC1, TINF2, CFTR, LRRK2, PARK2, PARK7, PINK1, SNCA, PSEN1, PSEN2, APP, SOD1, TDP43, FUS, ubiquilin 2, and/or C9ORF72, optionally wherein the protein is a FancA protein.

14. The recombinant Ad35 vector production system, donor genome, donor vector, or method of claim 13(d) or 13(e), wherein:
the gRNA binds a target nucleic acid sequence of HBG1, HBG2, and/or erythroid enhancer bcl11a, optionally wherein the gRNA is engineered to increase expression of γ-globin; or
the gRNA binds a target nucleic acid sequence that encodes a portion of CD33, optionally wherein the CD33 is human CD33.

15. The recombinant Ad35 vector production system, donor genome, donor vector, or method of claim 13, wherein the therapeutic expression product comprises:
a β-globin protein or a γ-globin protein; and
a CRISPR system comprising a CRISPR-associated RNA-guided endonuclease; and one, two, or three of:
a gRNA that binds a target nucleic acid sequence of HBG1;
a gRNA that binds a target nucleic acid sequence of HBG2; and/or
a gRNA that binds a target nucleic acid sequence of Bcl11a,
optionally wherein the gRNA is engineered to increase expression of γ-globin.

16. The recombinant Ad35 vector production system, donor genome, donor vector, or method of claim 13, wherein the regulatory sequence(s) comprise a promoter, optionally wherein the promoter is a β-globin promoter, optionally wherein the β-globin promoter has a length of about 1.6 kb and/or comprises a nucleic acid according to positions 5228631-5227023 of chromosome 11.

17. The recombinant Ad35 vector production system, donor genome, donor vector, or method of claim 13, wherein the regulatory sequence(s) comprise a Locus Control Region (LCR), optionally wherein the LCR is a β-globin LCR

18. The recombinant Ad35 vector production system, donor genome, donor vector, or method of claim 13, wherein the β-globin LCR:
comprises β-globin LCR DNAse I hypersensitive sites (HS) comprising or consisting of HS1, HS2, HS3, and HS4, optionally wherein the β-globin LCR has a length of about 4.3 kb; comprises β-globin LCR DNAse I HS comprising HS1, HS2, HS3, HS4, and HS5, optionally wherein the β-globin LCR has a length of about 21.5 kb; or
wherein the β-globin LCR comprises a sequence according to positions 5292319-5270789 of chromosome 11.

19. The recombinant Ad35 vector production system, donor genome, donor vector, or method of claim 13 or 14, wherein the regulatory sequence(s) comprise a 3′HS1, optionally wherein the 3′HS1 comprises a sequence according to positions 5206867-5203839 of chromosome 11.

20. The recombinant Ad35 vector production system, donor genome, donor vector, or method of claim 13, wherein the regulatory sequence(s) comprise an miRNA binding site, optionally wherein:
the miRNA binding site is a binding site for an miRNA naturally expressed by a species of interest;
the miRNA demonstrates differential occupancy profiles in the blood and a tumor microenvironment or target tissue, optionally wherein the occupancy profile is higher in blood than in the tumor microenvironment or target tissue;
the miRNA binding site comprises an miR423-5, miR423-5p, miR42-2, miR181c, miR125a, or miR15a binding sites; and/or
the miRNA binding sites comprise an miR187 or miR218 binding sites.

21. The recombinant Ad35 vector production system, donor genome, donor vector, or method of any one of claim 1, 4-7, or 10, wherein the nucleic acid encoding the heterologous expression product is part of a payload further comprising an integration element, optionally wherein the integration element comprises an expression product.

22. The recombinant Ad35 vector production system, donor genome, donor vector, or method of claim 21, wherein the integration element is engineered for integration into a target genome by homologous recombination, wherein the integration element is flanked by homology arms that correspond to contiguously linked sequences of the target genome, optionally wherein:
the homology arms are between 0.8 and 1.8 kb; and/or
the homology arms are homologous to nucleic acid sequences of the target genome that flank a chromosomal safe harbor locus, optionally wherein the safe harbor loci is selected from AAVS1, CCR5, HPRT, or Rosa.

23. The recombinant Ad35 vector production system, donor genome, donor vector, or method of claim 21, wherein the integration element is engineered for integration into a target genome by transposition, wherein the integration element is flanked by transposon inverted repeats (IRs), optionally wherein the transposon IRs are flanked by recombinase DRs.

24. The recombinant Ad35 vector production system, donor genome, donor vector, or method of claim 23, wherein:
the transposon IRs are Sleeping Beauty (SB) IRs, optionally wherein the SB IRs are pT4 IRs; or
the transposon IRs are piggyback, Mariner, frog prince, Tol2, TcBuster, or spinON IRs.

25. The recombinant Ad35 vector production system, donor genome, donor vector, or method of any one of claim 21, comprising a nucleic acid encoding a transposase that mediates transposition of the integration element flanked by the transposon IRs, optionally wherein the nucleic acid encoding the transposase is comprised by a support vector or support vector genome.

26. The recombinant Ad35 vector production system, donor genome, donor vector, or method of claim 25, wherein the transposase is a Sleeping beauty, piggyback, Mariner, frog prince, Tol2, TcBuster, or spinON transposase, optionally wherein the transposase is a Sleeping Beauty 100x (SB100x) transposase.

27. The recombinant Ad35 vector production system, donor genome, donor vector, or method of claim 25 or 26, wherein the nucleic acid encoding the transposase is operably linked with a PGK promoter.

28. The recombinant Ad35 vector production system, helper vector, helper genome, or method of any one of claim 1-3 or 6-10, wherein the recombinase DRs that flank at least a portion of the Ad35 packaging sequence and/or are within 550 nucleotides of the 5′ end of the Ad35 genome and functionally disrupt the Ad35 packaging signal but not the 5′ Ad35 ITR are FRT, loxP, rox, vox, AttB, or AttP sites.

29. The recombinant Ad35 vector production system, helper vector, helper genome, or method of claim 28, wherein a nucleic acid encoding a recombinase for excision of the at least portion of the Ad35 packaging sequence is encoded by a nucleic acid sequence of a cell comprising the helper genome.

30. The recombinant Ad35 vector production system, helper vector, helper genome, or method of any one of claim 23, wherein the recombinase DRs that flank the transposon IRs are FRT, loxP, rox, vox, AttB, or AttP sites.

31. The recombinant Ad35 vector production system, helper vector, helper genome, or method of any one of claim 21, wherein a nucleic acid encoding a recombinase for excision of the nucleic acid comprising the integration element is comprised by a support vector or support vector genome.

32. The recombinant Ad35 vector production system, helper vector, helper genome, or method of claim 29 or 31, wherein the recombinase is a Flp, Cre, Dre, Vika, or PhiC31 recombinase.

33. The recombinant Ad35 vector production system, helper vector, helper genome, or method of claim 32, wherein the nucleic acid encoding the recombinase is operably linked with an EF1α promoter.

34. The recombinant Ad35 vector production system, helper vector, helper genome, or method of any one of claim 21,
wherein the payload comprises an integration element comprising the heterologous expression product,
wherein the heterologous expression product comprises a β-globin protein operably linked with a β-globin promoter and a β-globin long LCR,
wherein the integration element is flanked by SB IRs,
and wherein the SB IRs are flanked by recombinase DRs, optionally wherein the recombinase DRs are FRT sites.

35. The recombinant Ad35 vector production system, helper vector, helper genome, or method of any one of claim 21, wherein the payload comprises:
an integration element, and
a conditionally expressed nucleic acid sequence that encodes an expression product, is not comprised by the integration element, and is positioned such that it is rendered nonfunctional by integration of the integration element into a target genome.

36. The recombinant Ad35 vector production system, helper vector, helper genome, or method of claim 35, wherein the expression product encoded by the conditionally expressed nucleic acid sequence comprises a CRISPR system component or a base editor system component, optionally wherein the component is a CRISPR-associated RNA-guided endonuclease, a base editor enzyme, or a gRNA.

37. The recombinant Ad35 vector production system, helper vector, helper genome, or method of any one of claim 21, wherein the payload comprises a selection cassette, optionally wherein the selection cassette is comprised by the integration element.

38. The recombinant Ad35 vector production system, helper vector, helper genome, or method of claim 37, wherein the selection cassette comprises a nucleic acid sequence encoding mgmt^{P140K} or wherein the selection cassette comprises a nucleic acid sequence encoding an anti-CD33 shRNA.

39. The recombinant Ad35 vector production system, helper vector, helper genome, or method of any one of claim 1-3 or 6-10, wherein the at least portion of the Ad35 packaging sequence flanked by recombinase DRs corresponds to nucleotides 138-481 of the Ad35 sequence according to GenBank Accession No. AX049983.

40. The recombinant Ad35 vector production system, helper vector, helper genome, or method of any one of claim 1-3 or 6-10, wherein the at least portion of the Ad35 packaging sequence flanked by recombinase DRs corresponds to: nucleotides 179-344; nucleotides 366-481; nucleotides 155-481; nucleotides 159-480; nucleotides 159-446; nucleotides 180-480; nucleotides 207-480; nucleotides 140-446; nucleotides 159-446; nucleotides 180-446; nucleotides 202-446; nucleotides 159-481; nucleotides 180-384; nucleotides 180-481; or nucleotides 207-481 of the Ad35 sequence according to GenBank Accession No. AX049983.

41. The recombinant Ad35 vector production system, helper vector, helper genome, or method of any one of claim 1-3 or 6-10, wherein the recombinase DRs are LoxP sites.

42. The helper vector or helper genome of any one of claim 2, 3, 8, or 9, wherein the Ad35 helper genome comprises Ad5 E4orf6 for amplification in 293 T cells.

43. The helper vector or helper genome of any one of claim 2, 3, 8, or 9, wherein the helper genome comprises or generates the sequence as set forth in any one of SEQ ID NOs: 51-65.

44. A cell comprising the helper vector, the helper genome, the donor vector, or the donor genome of any one of claim 2-5, 8, or 9, optionally wherein the cell is a HEK293 cell.

45. A cell comprising the donor genome of any one of claim 1, 4, 6, 7, 10, 13-27 or 44 optionally wherein the cell is an erythrocyte, optionally wherein the cell is a hematopoietic stem cell, T-cell, B-cell, or myeloid cell, optionally wherein the cell secretes the expression product.

46. The method of claim 6 or 10, wherein the cells are HEK293 cells.

47. A method of modifying a cell, the method comprising contacting the cell with an Ad35 donor vector according to any one of claim 5 or 11-27.

48. A method of modifying a cell of a subject, the method comprising administering to the subject an Ad35 donor vector according to any one of claim 5 or 11-27, optionally wherein the method does not comprise isolation of the cell from the subject.

49. A method of treating a disease or condition in a subject in need thereof, the method comprising administering to the subject an Ad35 donor vector according to any one of claim 5 or 11-27, optionally wherein the administration is intravenous.

50. The method of claim 49, wherein the method comprises administering to the subject a mobilization agent, optionally wherein the mobilization agent comprises one or more of granulocyte-colony stimulating factor, GM-CSF, S-CSF, a CXCR4 antagonist, and a CXCR2 agonist, optionally wherein the CXCR4 antagonist is AMD3100 and/or wherein the CXCR2 agonist is GRO-β.

51. The method of claim 49 or 50, wherein the Ad35 donor vector comprises a selection cassette, optionally wherein the method further comprises administering a selection agent to the subject, optionally wherein the selection cassette encodes mgmt^{P140K} and the selection agent is O⁶BG/BCNU.

52. The method of any one of claim 49, wherein the method further comprises administering to the subject an immune suppression agent, optionally wherein the immune suppression regimen comprises a steroid, an IL-6 receptor antagonist, and/or an IL-1 R receptor antagonist, optionally wherein the steroid comprises a glucocorticoid or dexamethasone.

53. The method of any one of claim 49, wherein the Ad35 donor vector comprises an integration element and the method causes integration and/or expression of a copy of the integration element thereof in at least 20%, 30%, 40%, 50%, 60%, 70%, 80%, 90%, or 95% of cells expressing CD46, in at least 20%, 30%, 40%, 50%, 60%, 70%, 80%, 90%, or 95% of hematopoietic stem cells, and/or in at least 20%, 30%, 40%, 50%, 60%, 70%, 80%, 90%, or 95% of erythroid Ter119⁺ cells.

54. The method of any one of claim 49, wherein the method causes integration of an average of at least 2 copies or at least 2.5 copies of the integration element in target cell genomes comprising at least 1 copy of the integration element.

55. The method of any one of claim 49, wherein the method causes expression of an expression product encoded by the payload or an integration element thereof at a level that is at least about 20% of the level of reference or at least about 25% of the level of a reference, optionally wherein the reference is expression of an endogenous reference protein in the subject or in a reference population.

56. The method of any one of claim 49, wherein the disease or condition is a hemoglobinopathy, a platelet disorder, anemia, an immune deficiency a coagulation factor deficiency, Fanconi anemia, alpha-1 antitrypsin deficiency, sickle cell anemia, thalassemia, thalassemia intermedia, hemophilia A, hemophilia B, von Willebrand Disease, Factor V Deficiency, Factor VII Deficiency, Factor X Deficiency, Factor XI Deficiency, Factor XII Deficiency, Factor XIII Deficiency, Bernard-Soulier Syndrome, Gray Platelet Syndrome, or mucopolysaccharidosis.

57. The method of any one of claim 49, wherein the subject is a subject suffering from cancer and the method treats, prevents, or delays cancer, or delays cancer recurrence,
optionally wherein the subject is a carrier of one or more germ-line mutation associated with development of cancer,
optionally wherein the cancer is anaplastic astrocytoma, breast cancer, ovarian cancer, colorectal cancer, diffuse intrinsic brainstem glioma, Ewing sarcoma, glioblastoma multiforme, malignant glioma, melanoma, metastatic malignant melanoma, nasopharyngeal cancer, or a pediatric cancer,
optionally wherein the subject has received or is administered O⁶BG, TMZ (temozolomide), and/or BCNU (Carmustine).

58. The method of any one of claim 49, wherein the disease or condition is thalassemia intermedia, optionally wherein the vector or genome comprises a nucleic acid encoding one or more expression products selected from:
expression product(s) that increase or reactivate expression of endogenous γ-globin, optionally wherein the expression product(s) that increase or reactivate expression of endogenous γ-globin comprises a CRISPR-associated RNA-guided endonuclease or base editor and one or more of:
a gRNA that binds a nucleic acid sequence of HBG1 and is engineered to increase expression from a coding sequence operably linked with the target nucleic acid sequence;
a gRNA that binds a nucleic acid sequence of HBG2 and is engineered to increase expression from a coding sequence operably linked with the target nucleic acid sequence; and
a gRNA that binds a nucleic acid sequence of erythroid enhancer bcl11a and is engineered to reduce BCL11A expression;
γ-globin; and
β-globin,
optionally wherein the method reduces a symptom of thalassemia intermedia and/or treats thalassemia intermedia and/or increases HbF.

The application's sequence listing, which the Patent Office published only in electronic form, follows.

SEQUENCE LISTING (325 sequences)

SEQ ID NO: 1 - DNA, 720 bp, Artificial Sequence
  5 end vector sequence, Sleeping Beauty IR/DR sequence, integration junction (chr15, 6805206)
ccctgggattccccaaggcaggggcgagtccttttgtatgaattactcaaatcgataactagaaacttaattaacaacgagatcttataatttgcatacttctgcctgctggggactttccacaccctagctgacacaagaatttgaaatacatccacaggtacacctccaattgactcaaatgatgtcaattagtctatcataatcttctaaagccatgacatcattttaactggaattttccaagctgtttaaaggcacagtcaacttagtgtatgtaaacttctgacccactggaattgtgatacagtgaattataagtgaaataatctgtctgtaaacaattgttggaaaaatgacttgtgtcatgcacaaagtagatgtcctaactgacttgccaaaactattgtttgttaacaagaaatttgtggagtagttgaaaaacgagttttaatgactccaacttaagtgtatgtaaacttccgacttcaactgtaagaatggcccattcatctatagtagcacacaatatttgcatttgtgcgacagtataagggacaattatgctatcaggcatttttccaaagtgagtaatcgaagtttttatacctttgtgtgccatgtttgctaccatggtgggataatcttacacgcgttctcgcgaccggccaggaaagacgcaacaaaccggaatcttctgcggcaaaagctttattgctt

SEQ ID NO: 2 - DNA, 607 bp, Artificial Sequence
  5 end vector sequence, Sleeping Beauty IR/DR sequence, integration junction (chrX, 16897322)
  misc_feature (594)..(594): n is a, c, g, or t
  misc_feature (596)..(597): n is a, c, g, or t
  misc_feature (602)..(602): n is a, c, g, or t
tagaaacttaattaacaacgagatcttataatttgcatacttctgcctgctggggactttccacaccctagctgacacaagaatttgaaatacatccacaggtacacctccaattgactcaaatgatgtcaattagtctatcataatcttctaaagccatgacatcattttaactggaattttccaagctgtttaaaggcacagtcaacttagtgtatgtaaacttctgacccactggaattgtgatacagtgaattataagtgaaataatctgtctgtaaacaattgttggaaaaatgacttgtgtcatgcaaagtagatgtcctaactgacttgccaaaactattgtttgttaacaagaaatttgtggagtagttgaaaaacgagttttaatgactccaacttaagtgtatgtaaacttccgacttcaactgtacaagtagaccaaatatccatatacataaaagaaaaaaatagaaaaaatttctagtgacagaaaaatgacaaagaacatactgtttattactactattaagatgtttgcttccattacactcatatgagtcatgatattttttcttcatttttttctantnncactngaaat

SEQ ID NO: 3 - DNA, 520 bp, Artificial Sequence
  3 end vector sequence, Sleeping Beauty IR/DR sequence, integration junction (chr4, 10207667)
gttgctaggaatgagccaaattcatctgtattaaacagtgggagcttgtggaaggctactcgaaatgtttgacccaagttaaacaatttaaaggcaatgctaccaaatactaattgagtgtatgttaacttctgacccactgggaatgtgatgaaagaaataaaagctgaaatgaatcattctctctactattattctgatatttcacattcttaaaataaagtggtgatcctaactgaccttaagacagggaatctttactcggattaaatgtcaggaattgtgaaaaagtgagtttaaatgtatttggctaaggtgtatgtaaacttccgacttcaactgtatatcctccccgttgcaccctcttgatgatgctgagatgaacacagatgctcactccttgagggctctaagcttatgctgacacagacacaggtgctcacttctatgaatggcctaagatttgaggacatcatgaggacaagtgtgataaaatcttggaacaacctcccagaggtct

SEQ ID NO: 4 - DNA, 74 bp, Artificial Sequence
  Sleeping beauty IR/DR sequence, integration junction (chr7, 79796094)
acttaagtgtatgtaaacttccgacttcaactgtagggtacctgattctctgggcatctctgcccactaccatg

SEQ ID NO: 5 - DNA, 75 bp, Artificial Sequence
  Sleeping beauty IR/DR sequence, Integration junction (repeat region)
acttaagtgtatgtaaacttccgacttcaactgtaaattttccacctttttcagttttcctcgccatatttcatg

SEQ ID NO: 6 - DNA, 64 bp, Artificial Sequence
  indels from HDAd-CRISPR-transduced CD34+ cells
tgtcccctccaccccacagtggggccactagggacaggattggtgacagaaaagccccatcctt

SEQ ID NO: 7 - DNA, 44 bp, Artificial Sequence
  indels from HDAd-CRISPR-transduced CD34+ cells
tgtcccctccaccccacagtgggtgacagaaaagccccatcctt

SEQ ID NO: 8 - DNA, 45 bp, Artificial Sequence
  indels from HDAd-CRISPR-transduced CD34+ cells
tgtcccctccaccccacagattggtgacagaaaagccccatcctt

SEQ ID NO: 9 - DNA, 52 bp, Artificial Sequence
  indels from HDAd-CRISPR-transduced CD34+ cells
tgtcccctccaccccacagtggggccactagggacagaaaagccccatcctt

SEQ ID NO: 10 - DNA, 53 bp, Artificial Sequence
  indels from HDAd-CRISPR-transduced CD34+ cells
tgtcccctccaccccacagtggggccactaggtgacagaaaagccccatcctt

SEQ ID NO: 11 - DNA, 54 bp, Artificial Sequence
  indels from HDAd-CRISPR-transduced CD34+ cells
tgtcccctccaccccacagtggggccactagggtgacagaaaagccccatcctt

SEQ ID NO: 12 - DNA, 54 bp, Artificial Sequence
  indels from HDAd-CRISPR-transduced CD34+ cells
tgtcccctccaccccacagtggggcaggattggtgacagaaaagccccatcctt

SEQ ID NO: 13 - DNA, 58 bp, Artificial Sequence
  indels from HDAd-CRISPR-transduced CD34+ cells
tgtcccctccaccccacagtggggccactaggattggtgacagaaaagccccatcctt

SEQ ID NO: 14 - DNA, 59 bp, Artificial Sequence
  indels from HDAd-CRISPR-transduced CD34+ cells
tgtcccctccaccccacagtggggccactagggattggtgacagaaaagccccatcctt

SEQ ID NO: 15 - DNA, 63 bp, Artificial Sequence
  indels from HDAd-CRISPR-transduced CD34+ cells
tgtcccctccaccccacagtggggccactagggacagattggtgacagaaaagccccatcctt

SEQ ID NO: 16 - DNA, 63 bp, Artificial Sequence
  indels from HDAd-CRISPR-transduced CD34+ cells
tgtcccctccaccccacagtggggccactagggacggattggtgacagaaaagccccatcctt

SEQ ID NO: 17 - DNA, 64 bp, Artificial Sequence
  indels from HDAd-CRISPR-transduced CD34+ cells
tgtcccctccaccccacagtggggccactagggacagaggattggtgacagaaaagccccatcc

SEQ ID NO: 18 - DNA, 64 bp, Artificial Sequence
  indels from HDAd-CRISPR-transduced CD34+ cells
tgtcccctccaccccacagtggggccactagggacagcaggattggtgacagaaaagccccatc

SEQ ID NO: 19 - DNA, 80 bp, Mus musculus
tgtcccctccaccccacagtggggccactagggacaggattggtgacagaaaagccccatccttaggcctcctccttcct

SEQ ID NO: 20 - DNA, 73 bp, Mus musculus
tgtcccctccaccccacagtggggccacaggattggtgacagaaaagccccatccttaggcctcctccttcct

SEQ ID NO: 21 - DNA, 75 bp, Mus musculus
tgtcccctccaccccacagtggggccactagggacaggtgacagaaaagccccatccttaggcctcctccttcct

SEQ ID NO: 22 - DNA, 75 bp, Mus musculus
tgtcccctccaccccacagtggggccactagggacaggtgacagaaaatccccatccttaggcctcctccttcct

SEQ ID NO: 23 - DNA, 75 bp, Mus musculus
tgtcccctccaccccacagtggggccactagggattggtgacagaaaagccccatccttaggcctcctccttcct

SEQ ID NO: 24 - DNA, 110 bp, Artificial Sequence
  microRNA regulated gene expression forward primer
ctaggaaagtctcgctctctgcccctcatcacaaagtctcgctctctgcccctcacgataaagtctcgctctctgcccctcattcaaaagtctcgctctctgcccctcac

SEQ ID NO: 25 - DNA, 110 bp, Artificial Sequence
  microRNA regulated gene expression reverse primer
tcgagtgaggggcagagagcgagacttttgaatgaggggcagagagcgagactttatcgtgaggggcagagagcgagactttgtgatgaggggcagagagcgagactttc

SEQ ID NO: 26 - DNA, 76 bp, Mus musculus
tgtcccctccaccccacagtggggccactaggggattggtgacagaaaagccccatccttaggcctcctccttcct

SEQ ID NO: 27 - DNA, 77 bp, Mus musculus
tgtcccctccaccccacagtggggccactaggaggattggtgacagaaaagccccatccttaggcctcctccttcct

SEQ ID NO: 28 - DNA, 77 bp, Mus musculus
tgtcccctccaccccacagtggggccactagcaggattggtgacagaaaagccccatccttaggcctcctccttcct

SEQ ID NO: 29 - DNA, 77 bp, Mus musculus
tgtcccctccaccccacagtggggccactaggcggattggtgacagaaaagccccatccttaggcctcctccttcct

SEQ ID NO: 30 - DNA, 77 bp, Mus musculus
tgtcccctccaccccacagtggggccactagccggattggtgacagaaaagccccatccttaggcctcctccttcct

SEQ ID NO: 31 - DNA, 24 bp, Artificial Sequence
  HBG1 forward primer
cacactccacacttttttgtttac

SEQ ID NO: 32 - DNA, 77 bp, Mus musculus
tgtcccctccaccccacagtggggccactaggagtattggtgacagaaaagccccatccttaggcctcctccttcct

SEQ ID NO: 33 - DNA, 26 bp, Artificial Sequence
  HBG1 reverse primer
aagtgtctttactgcttttatttgct

SEQ ID NO: 34 - DNA, 77 bp, Mus musculus
tgtcccctccaccccacagtggggccactaggaggattggtgacagaacagccccatccttaggcctcctccttcct

SEQ ID NO: 35 - DNA, 77 bp, Mus musculus
tgtcccctccaccccacagtggggccactagcagtattggtgacagaaaagccccatccttaggcctcctccttcct

SEQ ID NO: 36 - DNA, 77 bp, Mus musculus
tgtcccctccaccccacagtggggccactagcaggattggtgacagaacagccccatccttaggcctcctccttcct

SEQ ID NO: 37 - DNA, 78 bp, Mus musculus
tgtcccctccaccccacagtggggccactagggacgattggtgacagaaaagccccatccttaggcctcctccttcct

SEQ ID NO: 38 - DNA, 78 bp, Mus musculus
tgtcccctccaccccacagtggggccactagggaggattggtgacagaaaagccccatccttaggcctcctccttcct

SEQ ID NO: 39 - DNA, 78 bp, Mus musculus
tgtcccctccaccccacagtggggccactaggcaggattggtgacagaaaagccccatccttaggcctcctccttcct

SEQ ID NO: 40 - DNA, 78 bp, Mus musculus
tgtcccctccaccccacagtggggccactagggatgattggtgacagaaaagccccatccttaggcctcctccttcct

SEQ ID NO: 41 - DNA, 78 bp, Mus musculus
tgtcccctccaccccacagtggggccactagggacgcttggtgacagaaaagccccatccttaggcctcctccttcct

SEQ ID NO: 42 - DNA, 78 bp, Mus musculus
tgtcccctccaccccacagtggggccactagggaggcttggtgacagaaaagccccatccttaggcctcctccttcct

SEQ ID NO: 43 - DNA, 78 bp, Mus musculus
tgtcccctccaccccacagtggggccactagggacgattggtgacagacaagccccatccttaggcctcctccttcct

SEQ ID NO: 44 - DNA, 78 bp, Mus musculus
tgtcccctccaccccacagtggggccactagggaggattggtgacagacaagccccatccttaggcctcctccttcct

SEQ ID NO: 45 - DNA, 78 bp, Mus musculus
tgtcccctccaccccacagtggggccactagggacgattggtgccagaaaagccccatccttaggcctcctccttcct

SEQ ID NO: 46 - DNA, 78 bp, Mus musculus
tgtcccctccaccccacagtggggccactagggaggattggtgccagaaaagccccatccttaggcctcctccttcct

SEQ ID NO: 47 - DNA, 79 bp, Mus musculus
tgtcccctccaccccacagtggggccactagggacagattggtgacagaaaagccccatccttaggcctcctccttcct

SEQ ID NO: 48 - DNA, 141 bp, Artificial Sequence
  BCL11A binding site at HBG promoter
gggggccccttccccacactatctcaatgcaaatatctgtctgaaacggtccctggctaaactccaccatgggttggccagscttgccttgaccaatagccttgacaaggcaaacttgaccaatagtcttagagtatccag

SEQ ID NO: 49 - DNA, 599 bp, Adenovirus serotype 5
catcatcaataatataccttattttggattgaagccaatatgataatgagggggtggagtttgtgacgtggcgcggggcgtgggaacggggcgggtgacgtagtagtgtggcggaagtgtgatgttgcaagtgtggcggaacacatgtaagcgacggatgtggcaaaagtgacgtttttggtgtgcgccggtgtacacaggaagtgacaattttcgcgcggttttaggcggatgttgtagtaaatttgggcgtaaccgagtaagatttggccattttcgcgggaaaactgaataagaggaagtgaaatctgaataattttgtgttactcatagcgcgtaatatttgtctagggccgcgggactttgaccgtttacgtggagactcgcccaggtgtttttctcaggtgttttccgcgttccgggtcaaagttggcgttttattattatagtcagctgacgtgtagtgtatttatacccggtgagttcctcaagaggccactcttgagtgccagcgagtagagttttctcctccgagccgctccgacaccgggactgaaaatgagacatattatctgccacggaggtgttattaccgaaga

SEQ ID NO: 50 - DNA, 600 bp, Adenovirus serotype 35
catcatcaataatataccttatagatggaatggtgccaatatgtaaatgaggtgattttaaaaagtgtgggccgtgtggtgattggctgtggggttaacggttaaaaggggcggcgcggccgtgggaaaatgacgttttatgggggtggagtttttttgcaagttgtcgcgggaaatgttacgcataaaaaggcttcttttctcacggaactacttagttttcccacggtatttaacaggaaatgaggtagttttgaccggatgcaagtgaaaattgctgattttcgcgcgaaaactgaatgaggaagtgtttttctgaataatgtggtatttatggcagggtggagtatttgttcagggccaggtagactttgacccattacgtggaggtttcgattaccgtgttttttacctgaatttccgcgtaccgtgtcaaagtcttctgtttttacgtaggtgtcagctgatcgctagggtatttatacctcagggtttgtgtcaagaggccactcttgagtgccagcgagaagagttttctcctctgcgccggcagtttaataataaaaaaatgagagatttgcgatttctgcctcaggaaat

SEQ ID NO: 51 - DNA, 37638 bp, Artificial Sequence
  Ad35E4PS2/WL-ps2
  misc_feature (2582)..(2759): Ad35 1-->178
  misc_feature (2768)..(2801): loxP
  misc_feature (2808)..(2923): Ad35 366-->481
  misc_feature (2924)..(2957): loxP
  misc_feature (2966)..(27288): Ad35 3112-->27435
  misc_feature (27343)..(29812): lambda-1 (Complementary)
  misc_feature (30126)..(30340): BGH polyA
  misc_feature (30365)..(31030): copGFP  (Complementary)
  misc_feature (31077)..(31729): CMV (Complementary)
  misc_feature (31781)..(33310): lambda-2
  misc_feature (33371)..(34706): Ad35 30544-->31879
  misc_feature (34702)..(35816): Ad5E4orf6
  misc_feature (35814)..(37636): Ad35 32972-->34794
taaacttggcgcgccctgagtgatttttctctggtcccgccgcatccataccgccagttgtttaccctcacaacgttccagtaaccgggcatgttcatcatcagtaacccgtatcgtgagcatcctctctcgtttcatcggtatcattacccccatgaacagaaatcccccttacacggaggcatcagtgaccaaacaggaaaaaaccgcccttaacatggcccgctttatcagaagccagacattaacgcttctggagaaactcaacgagctggacgcggatgaacaggcagacatctgtgaatcgcttcacgaccacgctgatgagctttaccgcagctgcctcgcgcgtttcggtgatgacggtgaaaacctctgacacatgcagctcccggagacggtcacagcttgtctgtaagcggatgccgggagcagacaagcccgtcagggcgcgtcagcgggtgttggcgggtgtcggggcgcagccatgacccagtcacgtagcgatagcggagtgtatactggcttaactatgcggcatcagagcagattgtactgagagtgcaccatatgcggtgtgaaataccgcacagatgcgtaaggagaaaataccgcatcaggcgctcttccgcttcctcgctcactgactcgctgcgctcggtcgttcggctgcggcgagcggtatcagctcactcaaaggcggtaatacggttatccacagaatcaggggataacgcaggaaagaacatgtgagcaaaaggccagcaaaaggccaggaaccgtaaaaaggccgcgttgctggcgtttttccataggctccgcccccctgacgagcatcacaaaaatcgacgctcaagtcagaggtggcgaaacccgacaggactataaagataccaggcgtttccccctggaagctccctcgtgcgctctcctgttccgaccctgccgcttaccggatacctgtccgcctttctcccttcgggaagcgtggcgctttctcatagctcacgctgtaggtatctcagttcggtgtaggtcgttcgctccaagctgggctgtgtgcacgaaccccccgttcagcccgaccgctgcgccttatccggtaactatcgtcttgagtccaacccggtaagacacgacttatcgccactggcagcagccactggtaacaggattagcagagcgaggtatgtaggcggtgctacagagttcttgaagtggtggcctaactacggctacactagaaggacagtatttggtatctgcgctctgctgaagccagttaccttcggaaaaagagttggtagctcttgatccggcaaacaaaccaccgctggtagcggtggtttttttgtttgcaagcagcagattacgcgcagaaaaaaaggatctcaagaagatcctttgatcttttctacggggtctgacgctcagtggaacgaaaactcacgttaagggattttggtcatgagattatcaaaaaggatcttcacctagatccttttaaattaaaaatgaagttttaaatcaatctaaagtatatatgagtaaacttggtctgacagttaccaatgcttaatcagtgaggcacctatctcagcgatctgtctatttcgttcatccatagttgcctgactccccgtcgtgtagataactacgatacgggagggcttaccatctggccccagtgctgcaatgataccgcgagacccacgctcaccggctccagatttatcagcaataaaccagccagccggaagggccgagcgcagaagtggtcctgcaactttatccgcctccatccagtctattaattgttgccgggaagctagagtaagtagttcgccagttaatagtttgcgcaacgttgttgccattgctgcaggcatcgtggtgtcacgctcgtcgtttggtatggcttcattcagctccggttcccaacgatcaaggcgagttacatgatcccccatgttgtgcaaaaaagcggttagctccttcggtcctccgatcgttgtcagaagtaagttggccgcagtgttatcactcatggttatggcagcactgcataattctcttactgtcatgccatccgtaagatgcttttctgtgactggtgagtactcaaccaagtcattctgagaatagtgtatgcggcgaccgagttgctcttgcccggcgtcaacacgggataataccgcgccacatagcagaactttaaaagtgctcatcattggaaaacgttcttcggggcgaaaactctcaaggatcttaccgctgttgagatccagttcgatgtaacccactcgtgcacccaactgatcttcagcatcttttactttcaccagcgtttctgggtgagcaaaaacaggaaggcaaaatgccgcaaaaaagggaataagggcgacacggaaatgttgaatactcatactcttcctttttcaatattattgaagcatttatcagggttattgtctcatgagcggatacatatttgaatgtatttagaaaaataaacaaataggggttccgcgcacatttccccgaaaagtgccacctgtctagctacgatatcctgtttaaacatcatcaataatataccttatagatggaatggtgccaatatgtaaatgaggtgattttaaaaagtgtgggccgtgtggtgattggctgtggggttaacggttaaaaggggcggcgcggccgtgggaaaatgacgttttatgggggtggagtttttttgcaagttgtcgcgggaaatgatttaaatataacttcgtatagcatacattatacgaagttatggatcctagactttgacccattacgtggaggtttcgattaccgtgttttttacctgaatttccgcgtaccgtgtcaaagtcttctgtttttacgtaggtgtcagctgatcgctagggtatttataacttcgtatagcatacattatacgaagttatatttaaataggaatgtttatgccttaccagtgtaacatgaatcatgtgaaagtgttgttggaaccagatgccttttccagaatgagcctaacaggaatctttgacatgaacacgcaaatctggaagatcctgaggtatgatgatacgagatcgagggtgcgcgcatgcgaatgcggaggcaagcatgccaggttccagccggtgtgtgtagatgtgaccgaagatctcagaccggatcatttggttattgcccgcactggagcagagttcggatccagtggagaagaaactgactaaggtgagtattgggaaaactttggggtgggattttcagatggacagattgagtaaaaatttgttttttctgtcttgcagctgacatgagtggaaatgcttcttttaaggggggagtcttcagcccttatctgacagggcgtctcccatcctgggcaggagttcgtcagaatgttatgggatctactgtggatggaagacccgttcaacccgccaattcttcaacgctgacctatgctactttaagttcttcacctttggacgcagctgcagccgctgccgccgcctctgtcgccgctaacactgtgcttggaatgggttactatggaagcatcgtggctaattccacttcctctaataacccttctacactgactcaggacaagttacttgtccttttggcccagctggaggctttgacccaacgtctgggtgaactttctcagcaggtggccgagttgcgagtacaaactgagtctgctgtcggcacggcaaagtctaaataaaaaaaattccagaatcaatgaataaataaacgagcttgttgttgatttaaaatcaagtgtttttatttcatttttcgcgcacggtatgccctggaccaccgatctcgatcattgagaactcggtggattttttccagaatcctatagaggtgggattgaatgtttagatacatgggcattaggccgtctttggggtggagatagctccattgaagggattcatgctccggggtagtgttgtaaatcacccagtcataacaaggtcgcagtgcatggtgttgcacaatatcttttagaagtaggctgattgccacagataagcccttggtgtaggtgtttacaaaccggttgagctgggaggggtgcattcgaggtgaaattatgtgcattttggattggatttttaagttggcaatattgccgccaagatcccgtcttgggttcatgttatgaaggactaccaagacggtgtatccggtacatttaggaaatttatcgtgcagcttggatggaaaagcgtggaaaaatttggagacacccttgtgtcctccgagattttccatgcactcatccatgataatagcaatggggccgtgggcagcggcgcgggcaaacacgttccgtgggtctgacacatcatagttatgttcctgagttaaatcatcataagccattttaatgaatttggggcggagcgtaccagattggggtatgaatgttccttcgggccccggagcatagttcccctcacagatttgcatttcccaagctttcagttctgagggtggaatcatgtccacctggggggctatgaagaacaccgtttcgggggcgggggtgattagttgggatgatagcaagtttctgagcaattgagatttgccacatccggtggggccataaataattccgattacaggttgcaggtggtagtttagggaacggcaactgccgtcttctcgaagcaagggggccacctcgttcatcatttcccttacatgcatattttcccgcaccaaatccattaggaggcgctctcctcctagtgatagaagttcttgtagtgaggaaaagtttttcagcggttttagaccgtcagccatgggcattttggaaagagtttgctgcaaaagttctagtctgttccacagttcagtgatgtgttctatggcatctcgatccagcagacctcctcgtttcgcgggtttggacggctcctggagtagggtatgagacgatgggcgtccagcgctgccagggttcggtccttccagggtctcagtgttcgagtcagggttgtttccgtcacagtgaaggggtgtgcgcctgcttgggcgcttgccagggtgcgcttcagactcattctgctggtggagaacttctgtcgcttggcgccctgtatgtcggccaagtagcagtttaccatgagttcgtagttgagcgcctcggctgcgtggcctttggcgcggagcttacctttggaagttttcttgcataccgggcagtataggcatttcagcgcatacagcttgggcgcaaggaaaatggattctggggagtatgcatccgcgccgcaggaggcgcaaacagtttcacattccaccagccaggttaaatccggttcattggggtcaaaaacaagttttccgccatattttttgatgcgtttcttacctttggtctccataagttcgtgtcctcgttgagtgacaaacaggctgtccgtatctccgtagactgattttacaggcctcttctccagtggagtgcctcggtcttcttcgtacaggaactctgaccactctgatacaaaggcgcgcgtccaggccagcacaaaggaggctatgtgggaggggtagcgatcgttgtcaaccagggggtccaccttttccaaagtatgcaaacacatgtcaccctcttcaacatccaggaatgtgattggcttgtaggtgtatttcacgtgacctggggtccccgctgggggggtataaaagggggcggttctttgctcttcctcactgtcttccggatcgctgtccaggaacgtcagctgttggggtaggtattccctctcgaaggcgggcatgacctctgcactcaggttgtcagtttctaagaacgaggaggatttgatattgacagtgccggttgagatgcctttcatgaggttttcgtccatttggtcagaaaacacaatttttttattgtcaagtttggtggcaaatgatccatacagggcgttggataaaagtttggcaatggatcgcatggtttggttcttttccttgtccgcgcgctctttggcggcgatgttgagttggacatactcgcgtgccaggcacttccattcggggaagatagttgttaattcatctggcacgattctcacttgccaccctcgattatgcaaggtaattaaatccacactggtggccacctcgcctcgaaggggttcattggtccaacagagcctacctcctttcctagaacagaaagggggaagtgggtctagcataagttcatcgggagggtctgcatccatggtaaagattcccggaagtaaatccttatcaaaatagctgatgggagtggggtcatctaaggccatttgccattctcgagctgccagtgcgcgctcatatgggttaaggggactgccccagggcatgggatgggtgagagcagaggcatacatgccacagatgtcatagacgtagatgggatcctcaaagatgcctatgtaggttggatagcatcgcccccctctgatacttgctcgcacatagtcatatagttcatgtgatggcgctagcagccccggacccaagttggtgcgattgggtttttctgttctgtagacgatctggcgaaagatggcgtgagaattggaagagatggtgggtctttgaaaaatgttgaaatgggcatgaggtagacctacagagtctctgacaaagtgggcataagattcttgaagcttggttaccagttcggcggtgacaagtacgtctagggcgcagtagtcaagtgtttcttgaatgatgtcataacctggttggtttttcttttcccacagttcgcggttgagaaggtattcttcgcgatccttccagtactcttctagcggaaacccgtctttgtctgcacggtaagatcctagcatgtagaactgattaactgccttgtaagggcagcagcccttctctacgggtagagagtatgcttgagcagcttttcgtagcgaagcgtgagtaagggcaaaggtgtctctgaccatgactttgagaaattggtatttgaagtccatgtcgtcacaggctccctgttcccagagttggaagtctacccgtttcttgtaggcggggttgggcaaagcgaaagtaacatcattgaagagaatcttaccggctctgggcataaaattgcgagtgatgcggaaaggctgtggtacttccgctcgattgttgatcacctgggcagctaggacgatttcgtcgaaaccgttgatgttgtgtcctacgatgtataattctatgaaacgcggcgtgcctctgacgtgaggtagcttactgagctcatcaaaggttaggtctgtggggtcagataaggcgtagtgttcgagagcccattcgtgcaggtgaggatttgcatgtaggaatgatgaccaaagatctaccgccagtgctgtttgtaactggtcccgatactgacgaaaatgccggccaattgccattttttctggagtgacacagtagaaggttctggggtcttgttgccatcgatcccacttgagtttaatggctagatcgtgggccatgttgacgagacgctcttctcctgagagtttcatgaccagcatgaaaggaactagttgtttgccaaaggatcccatccaggtgtaagtttccacatcgtaggtcaggaagagtctttctgtgcgaggatgagagccgatcgggaagaactggatttcctgccaccagttggaggattggctgttgatgtgatggaagtagaagtttctgcggcgcgccgagcattcgtgtttgtgcttgtacagacggccgcagtagtcgcagcgttgcacgggttgtatctcgtgaatgagctgtacctggcttcccttgacgagaaatttcagtgggaagccgaggcctggcgattgtatctcgtgctcttctatattcgctgtatcggcctgttcatcttctgtttcgatggtggtcatgctgacgagcccccgcgggaggcaagtccagacctcggcgcgggaggggcggagctgaaggacgagagcgcgcaggctggagctgtccagagtcctgagacgctgcggactcaggttagtaggtagggacagaagattaacttgcatgatcttttccagggcgtgcgggaggttcagatggtacttgatttccacaggttcgtttgtagagacgtcaatggcttgcagggttccgtgtcctttgggcgccactaccgtacctttgttttttcttttgatcggtggtggctctcttgcttcttgcatgctcagaagcggtgacggggacgcgcgccgggcggcagcggttgttccggacccgggggcatggctggtagtggcacgtcggcgccgcgcacgggcaggttctggtattgcgctctgagaagacttgcgtgcgccaccacgcgtcgattgacgtcttgtatctgacgtctctgggtgaaagctaccggccccgtgagcttgaacctgaaagagagttcaacagaatcaatttcggtatcgttaacggcagcttgtctcagtatttcttgtacgtcaccagagttgtcctggtaggcgatctccgccatgaactgctcgatttcttcctcctgaagatctccgcgacccgctctttcgacggtggccgcgaggtcattggagatacggcccatgagttgggagaatgcattcatgcccgcctcgttccagacgcggctgtaaaccacggccccctcggagtctcttgcgcgcatcaccacctgagcgaggttaagctccacgtgtctggttaagaccgcatagttgcataggcgctgaaaaaggtagttgagtgtggtggcaatgtgttcggcgacgaagaaatacatgatccatcgtctcagcggcatttcgctaacatcgcccagagcttccaagcgctccatggcctcgtagaagtccacggcaaaattaaaaaactgggagtttcgcgcggacacggtcaattcctcctcgagaagacggatgagttcggctatggtggcccgtacttcgcgttcgaaggctcccgggatctcttcttcctcttctatctcttcttccactaacatctcttcttcgtcttcaggcgggggcggagggggcacgcggcgacgtcgacggcgcacgggcaaacggtcgatgaatcgttcaatgacctctccgcggcggcggcgcatggtttcagtgacggcgcggccgttctcgcgcggtcgcagagtaaaaacaccgccgcgcatctccttaaagtggtgactgggaggttctccgtttgggagggagagggcgctgattatacattttattaattggcccgtagggactgcgcgcagagatctgatcgtgtcaagatccacgggatctgaaaacctttcgacgaaagcgtctaaccagtcacagtcacaaggtaggctgagtacggcttcttgtgggcgggggtggttatgtgttcggtctgggtcttctgtttcttcttcatctcgggaaggtgagacgatgctgctggtgatgaaattaaagtaggcagttctaagacggcggatggtggcgaggagcaccaggtctttgggtccggcttgctggatacgcaggcgattggccattccccaagcattatcctgacatctagcaagatctttgtagtagtcttgcatgagccgttctacgggcacttcttcctcacccgttctgccatgcatacgtgtgagtccaaatccgcgcattggttgtaccagtgccaagtcagctacgactctttcggcgaggatggcttgctgtacttgggtaagggtggcttgaaagtcatcaaaatccacaaagcggtggtaagcccctgtattaatggtgtaagcacagttggccatgactgaccagttaactgtctggtgaccagggcgcacgagctcggtgtatttaaggcgcgaataggcgcgggtgtcaaagatgtaatcgttgcaggtgcgcaccagatactggtaccctataagaaaatgcggcggtggttggcggtagagaggccatcgttctgtagctggagcgccaggggcgaggtcttccaacataaggcggtgatagccgtagatgtacctggacatccaggtgattcctgcggcggtagtagaagcccgaggaaactcgcgtacgcggttccaaatgttgcgtagcggcatgaagtagttcattgtaggcacggtttgaccagtgaggcgcgcgcagtcattgatgctctatagacacggagaaaatgaaagcgttcagcgactcgactccgtagcctggaggaacgtgaacgggttgggtcgcggtgtaccccggttcgagacttgtactcgagccggccggagccgcggctaacgtggtattggcactcccgtctcgacccagcctacaaaaatccaggatacggaatcgagtcgttttgctggtttccgaatggcagggaagtgagtcctatttttttttttttttgccgctcagaatgcatcccgtgctgcgacagatgcgcccccaacaacagcccccctcgcagcagcagcagcagcaaccacaaaaggctgtccctgcaactactgcaactgccgccgtgagcggtgcgggacagcccgcctatgatctggacttggaagagggcgaaggactggcacgtctaggtgcgccttcgcccgagcggcatccgcgagttcaactgaaaaaagattctcgcgaggcgtatgtgccccaacagaacctatttagagacagaagcggcgaggagccggaggagatgcgagcttcccgctttaacgcgggtcgtgagctgcgtcacggtttggaccgaagacgagtgttgcgagacgaggatttcgaagttgatgaagtgacagggatcagtcctgccagggcacacgtggctgcagccaaccttgtatcggcttacgagcagacagtaaaggaagagcgtaacttccaaaagtcttttaataatcatgtgcgaaccctgattgcccgcgaagaagttacccttggtttgatgcatttgtgggatttgatggaagctatcattcagaaccctactagcaaacctctgaccgcccagctgtttctggtggtgcaacacagcagagacaatgaggctttcagagaggcgctgctgaacatcaccgaacccgaggggagatggttgtatgatcttatcaacattctacagagtatcatagtgcaggagcggagcctgggcctggccgagaaggtagctgccatcaattactcggttttgagcttgggaaaatattacgctcgcaaaatctacaagactccatacgttcccatagacaaggaggtgaagatagatgggttctacatgcgcatgacgctcaaggtcttgaccctgagcgatgatcttggggtgtatcgcaatgacagaatgcatcgcgcggttagcgccagcaggaggcgcgagttaagcgacagggaactgatgcacagtttgcaaagagctctgactggagctggaaccgagggtgagaattacttcgacatgggagctgacttgcagtggcagcctaatcgcagggctctgagcgccgcgacggcaggatgtgagcttccttacatagaagaggcggatgaaggcgaggaggaagagggcgagtacttggaagactgatggcacaacccgtgttttttgctagatggaacagcaagcaccggatcccgcaatgcgggcggcgctgcagagccagccgtccggcattaactcctcggacgattggacccaggccatgcaacgtatcatggcgttgacgactcgcaaccccgaagcctttagacagcaaccccaggccaaccgtctatcggccatcatggaagctgtagtgccttcccgatctaatcccactcatgagaaggtcctggccatcgtgaacgcgttggtggagaacaaagctattcgtccagatgaggccggactggtatacaacgctctcttagaacgcgtggctcgctacaacagtagcaatgtgcaaaccaatttggaccgtatgataacagatgtacgcgaagccgtgtctcagcgcgaaaggttccagcgtgatgccaacctgggttcgctggtggcgttaaatgctttcttgagtactcagcctgctaatgtgccgcgtggtcaacaggattatactaactttttaagtgctttgagactgatggtatcagaagtacctcagagcgaagtgtatcagtccggtcctgattacttctttcagactagcagacagggcttgcagacggtaaatctgagccaagcttttaaaaaccttaaaggtttgtggggagtgcatgccccggtaggagaaagagcaaccgtgtctagcttgttaactccgaactcccgcctgttattactgttggtagctcctttcaccgacagcggtagcatcgaccgtaattcctatttgggttacctactaaacctgtatcgcgaagccatagggcaaagtcaggtggacgagcagacctatcaagaaattacccaagtcagtcgcgctttgggacaggaagacactggcagtttggaagccactctgaacttcttgcttaccaatcggtctcaaaagatccctcctcaatatgctcttactgcggaggaggagaggatccttagatatgtgcagcagagcgtgggattgtttctgatgcaagagggggcaactccgactgcagcactggacatgacagcgcgaaatatggagcccagcatgtatgccagtaaccgacctttcattaacaaactgctggactacttgcacagagctgccgctatgaactctgattatttcaccaatgccatcttaaacccgcactggctgcccccacctggtttctacacgggcgaatatgacatgcccgaccctaatgacggatttctgtgggacgacgtggacagcgatgttttttcacctctttctgatcatcgcacgtggaaaaaggaaggcggtgatagaatgcattcttctgcatcgctgtccggggtcatgggtgctaccgcggctgagcccgagtctgcaagtccttttcctagtctacccttttctctacacagtgtacgtagcagcgaagtgggtagaataagtcgcccgagtttaatgggcgaagaggagtacctaaacgattccttgctcagaccggcaagagaaaaaaatttcccaaacaatggaatagaaagtttggtggataaaatgagtagatggaagacttatgctcaggatcacagagacgagcctgggatcatggggactacaagtagagcgagccgtagacgccagcgccatgacagacagaggggtcttgtgtgggacgatgaggattcggccgatgatagcagcgtgttggacttgggtgggagaggaaggggcaacccgtttgctcatttgcgccctcgcttgggtggtatgttgtgaaaaaaaataaaaaagaaaaactcaccaaggccatggcgacgagcgtacgttcgttcttctttattatctgtgtctagtataatgaggcgagtcgtgctaggcggagcggtggtgtatccggagggtcctcctccttcgtacgagagcgtgatgcagcagcagcaggcgacggcggtgatgcaatccccactggaggctccctttgtgcctccgcgatacctggcacctacggagggcagaaacagcattcgttactcggaactggcacctcagtacgataccaccaggttgtatctggtggacaacaagtcggcggacattgcttctctgaactatcagaatgaccacagcaacttcttgaccacggtggtgcagaacaatgactttacccctacggaagccagcacccagaccattaactttgatgaacgatcgcggtggggcggtcagctaaagaccatcatgcatactaacatgccaaacgtgaacgagtatatgtttagtaacaagttcaaagcgcgtgtgatggtgtccagaaaacctcccgacggtgctgcagttggggatacttatgatcacaagcaggatattttggaatatgagtggttcgagtttactttgccagaaggcaacttttcagttactatgactattgatttgatgaacaatgccatcatagataattacttgaaagtgggtagacagaatggagtgcttgaaagtgacattggtgttaagttcgacaccaggaacttcaagctgggatgggatcccgaaaccaagttgatcatgcctggagtgtatacgtatgaagccttccatcctgacattgtcttactgcctggctgcggagtggattttaccgagagtcgtttgagcaaccttcttggtatcagaaaaaaacagccatttcaagagggttttaagattttgtatgaagatttagaaggtggtaatattccggccctcttggatgtagatgcctatgagaacagtaagaaagaacaaaaagccaaaatagaagctgctacagctgctgcagaagctaaggcaaacatagttgccagcgactctacaagggttgctaacgctggagaggtcagaggagacaattttgcgccaacacctgttccgactgcagaatcattattggccgatgtgtctgaaggaacggacgtgaaactcactattcaacctgtagaaaaagatagtaagaatagaagctataatgtgttggaagacaaaatcaacacagcctatcgcagttggtatctttcgtacaattatggcgatcccgaaaaaggagtgcgttcctggacattgctcaccacctcagatgtcacctgcggagcagagcaggtttactggtcgcttccagacatgatgaaggatcctgtcactttccgctccactagacaagtcagtaactaccctgtggtgggtgcagagcttatgcccgtcttctcaaagagcttctacaacgaacaagctgtgtactcccagcagctccgccagtccacctcgcttacgcacgtcttcaaccgctttcctgagaaccagattttaatccgtccgccggcgcccaccattaccaccgtcagtgaaaacgttcctgctctcacagatcacgggaccctgccgttgcgcagcagtatccggggagtccaacgtgtgaccgttactgacgccagacgccgcacctgtccctacgtgtacaaggcactgggcatagtcgcaccgcgcgtcctttcaagccgcactttctaaaaaaaaaatgtccattcttatctcgcccagtaataacaccggttggggtctgcgcgctccaagcaagatgtacggaggcgcacgcaaacgttctacccaacatcccgtgcgtgttcgcggacattttcgcgctccatggggtgccctcaagggccgcactcgcgttcgaaccaccgtcgatgatgtaatcgatcaggtggttgccgacgcccgtaattatactcctactgcgcctacatctactgtggatgcagttattgacagtgtagtggctgacgctcgcaactatgctcgacgtaagagccggcgaaggcgcattgccagacgccaccgagctaccactgccatgcgagccgcaagagctctgctacgaagagctagacgcgtggggcgaagagccatgcttagggcggccagacgtgcagcttcgggcgccagcgccggcaggtcccgcaggcaagcagccgctgtcgcagcggcgactattgccgacatggcccaatcgcgaagaggcaatgtatactgggtgcgtgacgctgccaccggtcaacgtgtacccgtgcgcacccgtccccctcgcacttagaagatactgagcagtctccgatgttgtgtcccagcggcgaggatgtccaagcgcaaatacaaggaagaaatgctgcaggttatcgcacctgaagtctacggccaaccgttgaaggatgaaaaaaaaccccgcaaaatcaagcgggttaaaaaggacaaaaaagaagaggaagatggcgatgatgggctggcggagtttgtgcgcgagtttgccccacggcgacgcgtgcaatggcgtgggcgcaaagttcgacatgtgttgagacctggaacttcggtggtctttacacccggcgagcgttcaagcgctacttttaagcgttcctatgatgaggtgtacggggatgatgatattcttgagcaggcggctgaccgattaggcgagtttgcttatggcaagcgtagtagaataacttccaaggatgagacagtgtcaatacccttggatcatggaaatcccacccctagtcttaaaccggtcactttgcagcaagtgttacccgtaactccgcgaacaggtgttaaacgcgaaggtgaagatttgtatcccactatgcaactgatggtacccaaacgccagaagttggaggacgttttggagaaagtaaaagtggatccagatattcaacctgaggttaaagtgagacccattaagcaggtagcgcctggtctgggggtacaaactgtagacattaagattcccactgaaagtatggaagtgcaaactgaacccgcaaagcctactgccacctccactgaagtgcaaacggatccatggatgcccatgcctattacaactgacgccgccggtcccactcgaagatcccgacgaaagtacggtccagcaagtctgttgatgcccaattatgttgtacacccatctattattcctactcctggttaccgaggcactcgctactatcgcagccgaaacagtacctcccgccgtcgccgcaagacacctgcaaatcgcagtcgtcgccgtagacgcacaagcaaaccgactcccggcgccctggtgcggcaagtgtaccgcaatggtagtgcggaacctttgacactgccgcgtgcgcgttaccatccgagtatcatcacttaatcaatgttgccgctgcctccttgcagatatggccctcacttgtcgccttcgcgttcccatcactggttaccgaggaagaaactcgcgccgtagaagagggatgttgggacgcggaatgcgacgctacaggcgacggcgtgctatccgcaagcaattgcggggtggttttttaccagccttaattccaattatcgctgctgcaattggcgcgataccaggcatagcttccgtggcggttcaggcctcgcaacgacattgacattggaaaaaaaacgtataaataaaaaaaaatacaatggactctgacactcctggtcctgtgactatgttttcttagagatggaagacatcaatttttcatccttggctccgcgacacggcacgaagccgtacatgggcacctggagcgacatcggcacgagccaactgaacgggggcgccttcaattggagcagtatctggagcgggcttaaaaattttggctcaaccataaaaacatacgggaacaaagcttggaacagcagtacaggacaggcgcttagaaataaacttaaagaccagaacttccaacaaaaagtagtcgatgggatagcttccggcatcaatggagtggtagatttggctaaccaggctgtgcagaaaaagataaacagtcgtttggacccgccgccagcaaccccaggtgaaatgcaagtggaggaagaaattcctccgccagaaaaacgaggcgacaagcgtccgcgtcccgatttggaagagacgctggtgacgcgcgtagatgaaccgccttcttatgaggaagcaacgaagcttggaatgcccaccactagaccgatagccccaatggccaccggggtgatgaaaccttctcagttgcatcgacccgtcaccttggatttgccccctccccctgctgctactgctgtacccgcttctaagcctgtcgctgccccgaaaccagtcgccgtagccaggtcacgtcccgggggcgctcctcgtccaaatgcgcactggcaaaatactctgaacagcatcgtgggtctaggcgtgcaaagtgtaaaacgccgtcgctgcttttaattaaatatggagtagcgcttaacttgcctatctgtgtatatgtgtcattacacgccgtcacagcagcagaggaaaaaaggaagaggtcgtgcgtcgacgctgagttactttcaagatggccaccccatcgatgctgccccaatgggcatacatgcacatcgccggacaggatgcttcggagtacctgagtccgggtctggtgcagttcgcccgcgccacagacacctacttcaatctgggaaataagtttagaaatcccaccgtagcgccgacccacgatgtgaccaccgaccgtagccagcggctcatgttgcgcttcgtgcccgttgaccgggaggacaatacatactcttacaaagtgcggtacaccctggccgtgggcgacaacagagtgctggatatggccagcacgttctttgacattaggggcgtgttggacagaggtcccagtttcaaaccctattctggtacggcttacaactctctggctcctaaaggcgctccaaatgcatctcaatggattgcaaaaggcgtaccaactgcagcagccgcaggcaatggtgaagaagaacatgaaacagaggagaaaactgctacttacacttttgccaatgctcctgtaaaagccgaggctcaaattacaaaagagggcttaccaataggtttggagatttcagctgaaaacgaatctaaacccatctatgcagataaactttatcagccagaacctcaagtgggagatgaaacttggactgacctagacggaaaaaccgaagagtatggaggcagggctctaaagcctactactaacatgaaaccctgttacgggtcctatgcgaagcctactaatttaaaaggtggtcaggcaaaaccgaaaaactcggaaccgtcgagtgaaaaaattgaatatgatattgacatggaattttttgataactcatcgcaaagaacaaacttcagtcctaaaattgtcatgtatgcagaaaatgtaggtttggaaacgccagacactcatgtagtgtacaaacctggaacagaagacacaagttccgaagctaatttgggacaacagtctatgcccaacagacccaactacattggcttcagagataactttattggactcatgtactataacagtactggtaacatgggggtgctggctggtcaagcgtctcagttaaatgcagtggttgacttgcaggacagaaacacagaactttcttaccaactcttgcttgactctctgggcgacagaaccagatactttagcatgtggaatcaggctgtggacagttatgatcctgatgtacgtgttattgaaaatcatggtgtggaagatgaacttcccaactattgttttccactggacggcataggtgttccaacaaccagttacaaatcaatagttccaaatggagaagataataataattggaaagaacctgaagtaaatggaacaagtgagatcggacagggtaatttgtttgccatggaaattaaccttcaagccaatctatggcgaagtttcctttattccaatgtggctctgtatctcccagactcgtacaaatacaccccgtccaatgtcactcttccagaaaacaaaaacacctacgactacatgaacgggcgggtggtgccgccatctctagtagacacctatgtgaacattggtgccaggtggtctctggatgccatggacaatgtcaacccattcaaccaccaccgtaacgctggcttgcgttaccgatctatgcttctgggtaacggacgttatgtgcctttccacatacaagtgcctcaaaaattcttcgctgttaaaaacctgctgcttctcccaggctcctacacttatgagtggaactttaggaaggatgtgaacatggttctacagagttccctcggtaacgacctgcgggtagatggcgccagcatcagtttcacgagcatcaacctctatgctacttttttccccatggctcacaacaccgcttccacccttgaagccatgctgcggaatgacaccaatgatcagtcattcaacgactacctatctgcagctaacatgctctaccccattcctgccaatgcaaccaatattcccatttccattccttctcgcaactgggcggctttcagaggctggtcatttaccagactgaaaaccaaagaaactccctctttggggtctggatttgacccctactttgtctattctggttctattccctacctggatggtaccttctacctgaaccacacttttaagaaggtttccatcatgtttgactcttcagtgagctggcctggaaatgacaggttactatctcctaacgaatttgaaataaagcgcactgtggatggcgaaggctacaacgtagcccaatgcaacatgaccaaagactggttcttggtacagatgctcgccaactacaacatcggctatcagggcttctacattccagaaggatacaaagatcgcatgtattcatttttcagaaacttccagcccatgagcaggcaggtggttgatgaggtcaattacaaagacttcaaggccgtcgccataccctaccaacacaacaactctggctttgtgggttacatggctccgaccatgcgccaaggtcaaccctatcccgctaactatccctatccactcattggaacaactgccgtaaatagtgttacgcagaaaaagttcttgtgtgacagaaccatgtggcgcataccgttctcgagcaacttcatgtctatgggggcccttacagacttgggacagaatatgctctatgccaactcagctcatgctctggacatgacctttgaggtggatcccatggatgagcccaccctgctttatcttctcttcgaagttttcgacgtggtcagagtgcatcagccacaccgcggcatcatcgaggcagtctacctgcgtacaccgttctcggccggtaacgctaccacgtaagaagcttcttgcttcttgcaaatagcagctgcaaccatggcctgcggatcccaaaacggctccagcgagcaagagctcagagccattgtccaagacctgggttgcggaccctattttttgggaacctacgataagcgcttcccggggttcatggcccccgataagctcgcctgtgccattgtaaatacggccggacgtgagacggggggagagcactggttggctttcggttggaacccacgttctaacacctgctacctttttgatccttttggattctcggatgatcgtctcaaacagatttaccagtttgaatatgagggtctcctgcgccgcagcgctcttgctaccaaggaccgctgtattacgctggaaaaatctacccagaccgtgcagggcccccgttctgccgcctgcggacttttctgctgcatgttccttcacgcctttgtgcactggcctgaccgtcccatggacggaaaccccaccatgaaattgctaactggagtgccaaacaacatgcttcattctcctaaagtccagcccaccctgtgtgacaatcaaaaagcactctaccattttcttaatacccattcgccttattttcgctctcatcgtacacacatcgaaagggccactgcgttcgaccgtatggatgttcaataatgactcatgtaaacaacgtgttcaataaacatcactttatttttttacatgtatcaaggctctggattacttatttatttacaagtcgaatgggttctgacgagaatcagaatgacccgcaggcagtgatacgttgcggaactgatacttgggttgccacttgaattcgggaatcaccaacttgggaaccggtatatcgggcaggatgtcactccacagctttctggtcagctgcaaagctccaagcaggtcaggagccgaaatcttgaaatcacaattaggaccagtgctctgagcgcgagagttgcggtacaccggattgcagcactgaaacaccatcagcgacggatgtctcacgcttgccagcacggtgggatctgcaatcatgcccacatccagatcttcagcattggcaatgctgaacggggtcatcttgcaggtctgcctacccatggcgggcacccaattaggcttgtggttgcaatcgcagtgcagggggatcagtatcatcttggcctgatcctgtctgattcctggatacacggctctcatgaaagcatcatattgcttgaaagcctgctgggctttactaccctcgggataaaacatcccgcaggacctgctcgaaaactggttagcctgcacagccggcatcattcacacagcagcgggcgtcattgttggctatttgcaccacacttctgccccagcggttttgggtgattttggttcgctcgggattctcctttaaggctcgttgtccgttctcgctggccacatccatctcgataatctgctccttctgaatcataatattgccatgcaggcacttcagcttgccctcataatcattgcagccatgaggccacaacgcacagcctgtacattcccaattatggtgggcgatctgagaaaaagaatgtatcattccctgcagaaatcttcccatcatcgtgctcagtgtcttgtgactagtgaaagttaactggatgcctcggtgctcttcgtttacgtactggtgacagatgcgcttgtattgttcgtgttgctcaggcattagtttaaaacaggttctaagttcgttatccagcctgtacttctccatcagcagacacatcacttccatgcctttctcccaagcagacaccaggggcaagctaatcggattcttaacagtgcaggcagcagctcctttagccagagggtcatctttagcgatcttctcaatgcttcttttgccatccttctcaacgatgcgcacgggcgggtagctgaaacccactgctacaagttgcgcctcttctctttcttcttcgctgtcttgactgatgtcttgcatggggatatgtttggtcttccttggcttctttttggggggtatcggaggaggaggactgtcgctccgttccggagacagggaggattgtgacgtttcgctcaccattaccaactgactgtcggtagaagaacctgaccccacacggcgacaggtgtttttcttcgggggcagaggtggaggcgattgcgaagggctgcggtccgacctggaaggcggatgactggcagaaccccttccgcgttcgggggtgtgctccctgtggcggtcgcttaactgatttccttcgcggctggccattgtgttctcctaggcagagaaacaacagacatggaaactcagccattgctgtcaacatcgccacgagtgccatcacatctcgtcctcagcgacgaggaaaaggagcagagcttaagcattccaccgcccagtcctgccaccacctctaccctagaagataaggaggtcgacgcatctcatgacatgcagaataaaaaagcgaaagagtctgagacagacatcgagcaagacccgggctatgtgacaccggtggaacacgaggaagagttgaaacgctttctagagagagaggatgaaaactgcccaaaacagcgagcagataactatcaccaagatgctggaaatagggatcagaacaccgactacctcatagggcttgacggggaagacgcgctccttaaacatctagcaagacagtcgctcatagtcaaggatgcattattggacagaactgaagtgcccatcagtgtggaagagctcagctgcgcctacgagcttaaccttttttcacctcgtactccccccaaacgtcagccaaacggcacctgcgagccaaatcctcgcttaaacttttatccagcttttgctgtgccagaagtactggctacctatcacatcttttttaaaaatcaaaaaattccagtctcctgccgcgctaatcgcacccgcgccgatgccctactcaatctgggacctggttcacgcttacctgatatagcttccttggaagaggttccaaagatcttcgagggtctgggcaataatgagactcgggccgcaaatgctctgcaaaagggagaaaatggcatggatgagcatcacagcgttctggtggaattggaaggcgataatgccagactcgcagtactcaagcgaagcgtcgaggtcacacacttcgcatatcccgctgtcaacctgccccctaaagtcatgacggcggtcatggaccagttactcattaagcgcgcaagtcccctttcagaagacatgcatgacccagatgcctgtgatgagggtaaaccagtggtcagtgatgagcagctaacccgatggctgggcaccgactctccccgggatttggaagagcgtcgcaagcttatgatggccgtggtgctggttaccgtagaactagagtgtctccgacgtttctttaccgattcagaaaccttgcgcaaactcgaagagaatctgcactacacttttagacacggctttgtgcggcaggcatgcaagatatctaacgtggaactcaccaacctggtttcctacatgggtattctgcatgagaatcgcctaggacaaagcgtgctgcacagcacccttaagggggaagcccgccgtgattacatccgcgattgtgtctatctctacctgtgccacacgtggcaaaccggcatgggtgtatggcagcaatgtttagaagaacagaacttgaaagagcttgacaagctcttacagaaatctcttaaggttctgtggacagggttcgacgagcgcaccgtcgcttccgacctggcagacctcatcttcccagagcgtctcagggttactttgcgaaacggattgcctgactttatgagccagagcatgcttaacaattttcgctctttcatcctggaacgctccggtatcctgcccgccacctgctgcgcactgccctccgactttgtgcctctcacctaccgcgagtgccccccgccgctatggagtcactgctacctgttccgtctggccaactatctctcctaccactcggatgtgatcgaggatgtgagcggagacggcttgctggagtgccactgccgctgcaatctgtgcacgccccaccggtccctagcttgcaacccccagttgatgagcgaaacccagataataggcacctttgaattgcaaggccccagcagccaaggcgatgggtcttctcctgggcaaagtttaaaactgaccccgggactgtggacctccgcctacttgcgcaagtttgctccggaagattaccacccctatgaaatcaagttctatgaggaccaatcacagcctccaaaggccgaactttcggcttgcgtcatcacccagggggcaattctggcccaattgcaagccatccaaaaatcccgccaagaatttctactgaaaaagggtaagggggtctaccttgacccccagaccggcgaggaactcaacacaaggttccctcaggatgtcccaacgacgagaaaacaagaagttgaaggtgcagccgccgcccccagaagatatggaggaagattgggacagtcaggcagaggaggcggaggaggacagtctggaggacagtctggaggaagacagtttggaggaggaaaacgaggaggcagaggaggtggaagaagtaaccgccgacaaacagttatcctcggctgcggagacaagcaacagcgctaccatctccgctccgagtcgaggaacccggcggcgtcccagcagtagatgggacgagaccggacgcttcccgaacccaaccagcgcttccaagaccggtaagaaggatcggcagggatacaagtcctggcgggggcataagaatgccatcatctcctgcttgcatgagtgcgggggcaacatatccttcacgcggcgctacttgctattccaccatggggtgaactttccgcgcaatgttttgcattactaccgtcacctccacagcccctactatagccagcaaatcccgacagtctcgacagataaagacagcggcggcgacctccaacagaaaaccagcagcggcagttagaaaatacacaacaagtgcagcaacaggaggattaaagattacagccaacgagccagcgcaaacccgagagttaagaaatcggatctttccaaccctgtatgccatcttccagcagagtcggggtcaagagcaggaactgaaaataaaaaaccgatctctgcgttcgctcaccagaagttgtttgtatcacaagagcgaagatcaacttcagcgcactctcgaggacgccgaggctctcttcaacaagtactgcgcgctgactcttaaagagtaggcagcgaccgcgcttattcaaaaaaggcgggaattacatcatcctcgacatgagtaaagaaattcccacgccttacatgtggagttatcaaccccaaatgggattggcagcaggcgcctcccaggactactccacccgcatgaattggctcagcgccgggccttctatgatttctcgagttaatgatatacgcgcctaccgaaaccaaatacttttggaacagtcagctcttaccaccacgccccgccaacaccttaatcccagaaattggcccgccgccctagtgtaccaggaaagtcccgctcccaccactgtattacttcctcgagacgcccaggccgaagtccaaatgactaatgcaggtgcgcagttagctggcggctccaccctatgtcgtcacaggcctcggcataatataaaacgcctgatgatcagaggccgaggtatccagctcaacgacgagtcggtgagctctccgcttggtctacgaccagacggaatctttcagattgccggctgcgggagatcttccttcacccctcgtcaggctgttctgactttggaaagttcgtcttcgcaaccccgctcgggcggaatcgggaccgttcaatttgtagaggagtttactccctctgtctacttcaaccccttctccggatctcctgggcactacccggacgagttcataccgaacttcgacgcgattagcgagtcagtggacggctacgattgatgtctggtgacgcggctgagctatctcggctgcgacatctagaccactgccgccgctttcgctgctttgcccgggaacttattgagttcatctacttcgaactccccaaggatcaccctcaaggtccggcccacggagtgcggattactatcgaaggcaaaatagactctcgcctgcaacgaattttctcccagcggcccgtgctgatcgagcgagaccagggaaacaccacggttagtaatcaattacggggtcattagttcatagcccatatatggagttgcgatcgctgcgggccatgtcatacaccgccttcagagcagccggacctatctgcccgttcgtgccgtcgttgttaatcaccacatggttattctgctcaaacgtcccggacgcctgcgaccggctgtctgccatgctgcccggtgtaccgacataaccgccggtggcatagccgcgcatcagccggtaaagattccccacgccaatccggctggttgcctccttcgtgaagacaaactcaccacggtgaacaatccccgctggctcatatttgccgccggttcccgtaaatcctccggttgcaaaatggaatttcgccgcagcggcctgaatggctgtaccgcctgacgcggatgcgccgccaccaacagccccgccaatggcgctgccgatactcccgacaatccccaccattgcctgcttaagcagaatttctgtcatcatggacagcacggaacgggtgaagctgcgccagttctgctcactgccggtcagcatcgccgccatattctgtgcaataccatcaaaggtctgcgtggctgcactttttacctgcgacatactgtccgtggcgctctcttcccactcactccagccggacttcaggcctgccatccagttcccgcgaagctggtcttcagccgcccaggtctttttctgctctgacatgacgttattcagcgccagcggattatcgccatactgttccttcaggcgctgttccgtggcttcccgttctgcctgccggtcagtcagcccccggcttttcgcatcaatggcggcccgttttgcccgttgctgctgtgcgaatttatccgcctgctgcgccagcgcgttcaggcgctcctgatacgtaaccttgtcgccaagtgcagccagctggcgtttgtactccagcgtctcatctttatgcgccagcagggatttctcctgtgcagacagctggcgacgttgcgccgcctcctccagtaccgcgaactgactctccgccttccacaaatcccggcgctgctggctgattttctcatttgctccggcatgcttctccagcgtccggagttctgcctgaagcgtcagcagggcagcatgagcactgtcttcctgacgatcgcccgcagacaccttcacgctggactgtttcggctttttcagcgtcgcttcataatcctttttcgccgccgccatcagcgtgttgtaatccgcctgcaggattttcccgtctttcagtgccttgttcagttcttcctgacgggcggtatatttctccagcggcgtctgcagccgttcgtaagccttctgcgcctcttcggtatatttcagccgtgacgcttcggtatcgctctgctgctgcgcatttttgtcctgttgagtctgctgctcagccttctttcgggcggcttcaagcgcaagacgggccttttcacgatcatcccagtaacgcgcccgcgcttcatcgttaacaaaataatcatccttgcgcagattccagatgtcgtctgctttcttatacgcagcctctgccttaatcagcatctcctgcgcggtatcaggacgaccaatatccagcaccgcatcccacatggatttgaatgcccgcgcagtcctgtctgcccaggtctccagcgtgcccatgttctctttcaggcggcgggtctggtcatcaaaccctttcgttgcggcctcgttcgccgcctgcaatgccccggcttcatcgccggaacgctgcaactgagcaacatacgcaatctgctccgccgacacgttatggaactggcgagccatcgccgtcagccccgacgtcgggtctgtggtcagcttcccgaaggcttcagcgaccttgtccacctccacgccggatgcagaggagaaacgcgccacactctggctgatggacgcaatctgagcctcaccgcttacccccgccttaaccagtgcgctgagtgactcgctggtctggttaaacgtcagccctgccgcctgcccggctctggacaggaccagcatacgatctgccgtcagtcccgcctgattgccggaaaggaccagcgttttgttgaaatcggacagggttgagttgccctgataccaggcatacgccagcgcaccggtcgccaccgccagcgaggtggcccccaccatcggcagggtgatcgcaccggcaagccccctgaacatggggatcatcccgccgaaggagtccttcacctgccccccctgttgcagcaggatcagccacggactttgcccgcctgcaagctgcgtggccacgtcggtgaactgtgcaggcagcatacgcatggcggctttatactgcccgacggaaatccccgctttctgtgcagccagcgcctgtcggctcagcgactgttcaacgactgccgctgtttttttcgcatcactttccgtaccagaaaaatgacgcctgactctggccatctgctcgtcaaatctggccgcatccagactcaaatcaacgacgtcgactaagctctagcatttgtgaaccatcaccctaatcaagttttttggggtcgaggtgccgtaaagcactaaatcggaaccctaaagggagcccccgatttagagcttgacggggaaagccggcgaacgtggcgagaaaggaagggaagaaagcgaaaggagcgggcgctagggcgctggcaagtgtagcggtcacgctgcgcgtaaccaccacacccgccgcgcttaatgcgccgctacagggcgcgtggggataccccctagagccccagctggttctttccgcctcagaagccatagagcccaccgcatccccagcatgcctgctattgtcttcccaatcctcccccttgctgtcctgccccaccccaccccccagaatagaatgacacctactcagacaatgcgatgcaatttcctcattttattaggaaaggacagtgggagtggcaccttccagggtcaaggaaggcacgggggaggggcaaacaacagatggctggcaactagaaggcacagtcgaggctgatcagcgggtttgctagcttaggcgaaggcgatgggggtcttgaaggcgtgctggtactccacgatgcccagctcggtgttgctgtgcagctcctccacgcggcggaaggcgaacatggggcccccgttctgcaggatgctggggtggatggcgctcttgaagtgcatgtggctgtccaccacgaagctgtagtagccgccgtcgcgcaggctgaaggtgcgggcgaagctgcccaccagcacgttatcgcccatggggtgcaggtgctccacggtggcgttgctgcggatgatcttgtcggtgaagatcacgctgtcctcggggaagccggtgcccaccaccttgaagtcgccgatcacgcggccggcctcgtagcggtagctgaagctcacgtgcagcacgccgccgtcctcgtacttctcgatgcgggtgttggtgtagccgccgttgttgatggcgtgcaggaaggggttctcgtagccgctggggtaggtgccgaagtggtagaagccgtagcccatcacgtggctcagcaggtaggggctgaaggtcagggcgcctttggtgctcttcatcttgttggtcatgcggccctgctcgggggtgccctctccgccgcccaccagctcgaactccacgccgttcagggtgccggtgatgcggcactcgatcttcatggcgggcatggtggctagcctagccagcttgggtctccctatagtgagtcgtattaatttcgataagccagtaagcagtgggttctctagttagccagagagctctgcttatatagacctcccaccgtacacgcctaccgcccatttgcgtcaatggggcggagttgttacgacattttggaaagtcccgttgattttggtgccaaaacaaactcccattgacgtcaatggggtggagacttggaaatccccgtgagtcaaaccgctatccacgcccattgatgtactgccaaaaccgcatcaccatggtaatagcgatgactaatacgtagatgtactgccaagtaggaaagtcccataaggtcatgtactgggcataatgccaggcgggccatttaccgtcattgacgtcaatagggggcgtacttggcatatgatacacttgatgtactgccaagtgggcagtttaccgtaaatactccacccattgacgtcaatggaaagtccctattggcgttactatgggaacatacgtcattattgacgtcaatgggcgggggtcgttgggcggtcagccaggcgggccatttaccgtaagttatgtaacgcggaactccatatatgggctatgaactaatgaccccgtaattgattactattaataactacaataatcaatgtcaacgcgtatatctggcccgtacatcgcgaagcagcgcaaaacgcctaaccctaagcagattcttcatgcaattaagcttcgcggtgcttcttcagtacgctacggcaaatgtcatcgacgtttttatccggaaactgctgtctggctttttttgatttcagaattagcctgacgggcaatgctgcgaagggcgttttcctgctgaggtgtcattgaacaagtcccatgtcggcaagcataagcacacagaatatgaagcccgctgccagaaaaatgcattccgtggttgtcatacctggtttctctcatctgcttctgctttcgccaccatcatttccagcttttgtgaaagggatgcggctaacgtatgaaattcttcgtctgtttctactggtattggcacaaacctgattccaatttgagcaaggctatgtgccatctcgatactcgttcttaactcaacagaagatgctttgtgcatacagcccctcgtttattatttatctcctcagccagccgctgtgctttcagtggatttcggataacagaaaggccgggaaatacccagcctcgctttgtaacggagtagacgaaagtgattgcgcctacccggatattatcgtgaggatgcgtcatcgccattgctccccaaatacaaaaccaatttcagccagtgcctcgtccattttttcgatgaactccggcacgatctcgtcaaaactcgccatgtacttttcatcccgctcaatcacgacataatgcaggccttcacgcttcatacgcgggtcatagttggcaaagtaccaggcattttttcgcgtcacccacatgctgtactgcacctgggccatgtaagctgactttatggcctcgaaaccaccgagccggaacttcatgaaatcccgggaggtaaacgggcatttcagttcaaggccgttgccgtcactgcataaaccatcgggagagcaggcggtacgcatactttcgtcgcgatagatgatcggggattcagtaacattcacgccggaagtgaattcaaacagggttctggcgtcgttctcgtactgttttccccaggccagtgctttagcgttaacttccggagccacaccggtgcaaacctcagcaagcagggtgtggaagtaggacattttcatgtcaggccacttctttccggagcggggttttgctatcacgttgtgaacttctgaagcggtgatgacgccgagccgtaatttgtgccacgcatcatccccctgttcgacagctctcacatcgatcccggtacgctgcaggataatgtccggtgtcatgctgccaccttctgctctgcggctttctgtttcaggaatccaagagcttttactgcttcggcctgtgtcagttctgacgatgcacgaatgtcgcggcgaaatatctgggaacagagcggcaataagtcgtcatcccatgttttatccagggcgatcagcagagtgttaatctcctgcatggtttcatcgttaaccggagtgatgtcgcgttccggctgacgttctgcagtgtatgcagtattttcgacaatgcgctcggcttcatccttgtcatagataccagcaaatccgaagcggccgcggaacaacaacaattgcattcattttatgtttcaggttcagggggaggtgtggtcctgcgattccatcgagtgcacctacaccctgctgaagaccctatgcggcctaagagacctgctaccaatgaattaaaaaaaaatgattaataaaaaatcacttacttgaaatcagcaataaggtctctgttgaaattttctcccagcagcacctcacttccctcttcccaactctggtattctaaaccccgttcagcggcatactttctccatactttaaaggggatgtcaaattttagctcctctcctgtacccacaatcttcatgtctttcttcccagatgaccaagagagtccggctcagtgactccttcaaccctgtctacccctatgaagatgaaagcacctcccaacaccccttttataacccagggtttatttccccaaatggcttcacacaaagcccagacggagttcttactttaaaatgtttaaccccactaacaaccacaggcggatctctacagctaaaagtgggagggggacttacagtggatgacactgatggtaccttacaagaaaacatacgtgctacagcacccattactaaaaataatcactctgtagaactatccattggaaatggattagaaactcaaaacaataaactatgtgccaaattgggaaatgggttaaaatttaacaacggtgacatttgtataaaggatagtattaacaccttatggactggaataaaccctccacctaactgtcaaattgtggaaaacactaatacaaatgatggcaaacttactttagtattagtaaaaaatggagggcttgttaatggctacgtgtctctagttggtgtatcagacactgtgaaccaaatgttcacacaaaagacagcaaacatccaattaagattatattttgactcttctggaaatctattaactgaggaatcagacttaaaaattccacttaaaaataaatcttctacagcgaccagtgaaactgtagccagcagcaaagcctttatgccaagtactacagcttatcccttcaacaccactactagggatagtgaaaactacattcatggaatatgttactacatgactagttatgatagaagtctatttcccttgaacatttctataatgctaaacagccgtatgatttcttccaatgttgcctatgccatacaatttgaatggaatctaaatgcaagtgaatctccagaaagcaacatagctacgctgaccacatccccctttttcttttcttacattacagaagacgacaactaaaataaagtttaagtgtttttatttaaaatcacaaaattcgagtagttattttgcctccaccttcccatttgacagaatacacagtcctttctccccggctggccttaaaaagcatcatatcatgggtaacagacatattcttaggtgttatattccacacggtttcctgtcgagccaaacgctcatcagtgatattaataaactccccgggcagctcacttaagttcatgtcgctgtccagctgctgagccacaggctgctgtccaacttgcggttgcttaacgggcggcgaaggagaagtccacgcctacatgggggtagagtcataatcgtgcatcaggatagggcggtggtgctgcagcagcgcgcgaataaactgctgccgccgccgctccgtcctgcaggaatacaacatggcagtggtctcctcagcgatgattcgcaccgcccgcagcataaggcgccttgtcctccgggcacagcagcgcaccctgatctcacttaaatcagcacagtaactgcagcacagcaccacaatattgttcaaaatcccacagtgcaaggcgctgtatccaaagctcatggcggggaccacagaacccacgtggccatcataccacaagcgcaggtagattaagtggcgacccctcataaacacgctggacataaacattacctcttttggcatgttgtaattcaccacctcccggtaccatataaacctctgattaaacatggcgccatccaccaccatcctaaaccagctggccaaaacctgcccgccggctatacactgcagggaaccgggactggaacaatgacagtggagagcccaggactcgtaaccatggatcatcatgctcgtcatgatgtcaatgttggcacaacacaggcacacgtgcatacacttcctcaggattacaagctcctcccgcgttagaaccatatcccagggaacaacccattcctgaatcagcgtaaatcccacactgcagggaagacctcgcacgtaactcacgttgtgcattgtcaaagtgttacattcgggcagcagcggatgatcctccagtatggtagcgcgggtttctgtctcaaaaggaggtagacgatccctactgtacggagtgcgccgagacaaccgagatcgtgttggtcgtagtgtcatgccaaatggaacgccggacgtagtcattctcgtattttgtatagcaaaacgcggccctggcagaacacactcttcttcgccttctatcctgccgcttagcgtgttccgtgtgatagttcaagtacagccacactcttaagttggtcaaaagaatgctggcttcagttgtaatcaaaactccatcgcatctaattgttctgaggaaatcatccacggtagcatatgcaaatcccaaccaagcaatgcaactggattgcgtttcaagcaggagaggagagggaagagacggaagaaccatgttaatttttattccaaacgatctcgcagtacttcaaattgtagatcgcgcagatggcatctctcgcccccactgtgttggtgaaaaagcacagctaaatcaaaagaaatgcgattttcaaggtgctcaacggtggcttccaacaaagcctccacgcgcacatccaagaacaaaagaataccaaaagaaggagcattttctaactcctcaatcatcatattacattcctgcaccattcccagataattttcagctttccagccttgaattattcgtgtcagttcttgtggtaaatccaatccacacattacaaacaggtcccggagggcgccctccaccaccattcttaaacacaccctcataatgacaaaatatcttgctcctgtgtcacctgtagcgaattgagaatggcaacatcaattgacatgcccttggctctaagttcttctttaagttctagttgtaaaaactctctcatattatcaccaaactgcttagccagaagccccccgggaacaagagcaggggacgctacagtgcagtacaagcgcagacctccccaattggctccagcaaaaacaagattggaataagcatattgggaaccaccagtaatatcatcgaagttgctggaaatataatcaggcagagtttcttgtagaaattgaataaaagaaaaatttgccaaaaaaacattcaaaacctctgggatgcaaatgcaataggttaccgcgctgcgctccaacattgttagttttgaattagtctgcaaaaataaaaaaaaaacaagcgtcatatcatagtagcctgacgaacaggtggataaatcagtctttccatcacaagacaagccacagggtctccagctcgaccctcgtaaaacctgtcatcgtgattaaacaacagcaccgaaagttcctcgcggtgaccagcatgaataagtcttgatgaagcatacaatccagacatgttagcatcagttaaggagaaaaaacagccaacatagcctttgggtataattatgcttaatcgtaagtatagcaaagccacccctcgcggatacaaagtaaaaggcacaggagaataaaaaatataattatttctctgctgctgtttaggcaacgtcgcccccggtccctctaaatacacatacaaagcctcatcagccatggcttaccagagaaagtacagcgggcacacaaaccacaagctctaaagtcactctccaacctctccacaatatatatacacaagccctaaactgacgtaatgggactaaagtgtaaaaaatcccgccaaacccaacacacaccccgaaactgcgtcaccagggaaaagtacagtttcacttccgcaatcccaacaagcgtcacttcctctttctcacggtacgtcacatcccattaacttacaacgtcattttcccacggccgcgccgccccttttaaccgttaaccccacagccaatcaccacacggcccacactttttaaaatcacctcatttacatattggcaccattccatctataaggtatattattgatgatgtt

SEQ ID NO: 52 - DNA, 37825 bp, Artificial Sequence
  Ad35E4PS3/WL-ps3
  misc_feature (2582)..(2735): Ad35 1-->154
  misc_feature (2744)..(2777): loxP
  misc_feature (2784)..(3110): Ad35 155-->481
  misc_feature (3111)..(3144): loxP
  misc_feature (27530)..(29999): lambda-1 (Complementary)
  misc_feature (30313)..(30527): BGH polyA
  misc_feature (30552)..(31217): copGFP (Complementary)
  misc_feature (31264)..(31916): CMV (Complementary)
  misc_feature (31968)..(33497): lambda-2
  misc_feature (33558)..(34893): Ad35 30544-->31879
  misc_feature (34889)..(36003): Ad5E4orf6
  misc_feature (36001)..(37823): Ad35 32972-->34794
taaacttggcgcgccctgagtgatttttctctggtcccgccgcatccataccgccagttgtttaccctcacaacgttccagtaaccgggcatgttcatcatcagtaacccgtatcgtgagcatcctctctcgtttcatcggtatcattacccccatgaacagaaatcccccttacacggaggcatcagtgaccaaacaggaaaaaaccgcccttaacatggcccgctttatcagaagccagacattaacgcttctggagaaactcaacgagctggacgcggatgaacaggcagacatctgtgaatcgcttcacgaccacgctgatgagctttaccgcagctgcctcgcgcgtttcggtgatgacggtgaaaacctctgacacatgcagctcccggagacggtcacagcttgtctgtaagcggatgccgggagcagacaagcccgtcagggcgcgtcagcgggtgttggcgggtgtcggggcgcagccatgacccagtcacgtagcgatagcggagtgtatactggcttaactatgcggcatcagagcagattgtactgagagtgcaccatatgcggtgtgaaataccgcacagatgcgtaaggagaaaataccgcatcaggcgctcttccgcttcctcgctcactgactcgctgcgctcggtcgttcggctgcggcgagcggtatcagctcactcaaaggcggtaatacggttatccacagaatcaggggataacgcaggaaagaacatgtgagcaaaaggccagcaaaaggccaggaaccgtaaaaaggccgcgttgctggcgtttttccataggctccgcccccctgacgagcatcacaaaaatcgacgctcaagtcagaggtggcgaaacccgacaggactataaagataccaggcgtttccccctggaagctccctcgtgcgctctcctgttccgaccctgccgcttaccggatacctgtccgcctttctcccttcgggaagcgtggcgctttctcatagctcacgctgtaggtatctcagttcggtgtaggtcgttcgctccaagctgggctgtgtgcacgaaccccccgttcagcccgaccgctgcgccttatccggtaactatcgtcttgagtccaacccggtaagacacgacttatcgccactggcagcagccactggtaacaggattagcagagcgaggtatgtaggcggtgctacagagttcttgaagtggtggcctaactacggctacactagaaggacagtatttggtatctgcgctctgctgaagccagttaccttcggaaaaagagttggtagctcttgatccggcaaacaaaccaccgctggtagcggtggtttttttgtttgcaagcagcagattacgcgcagaaaaaaaggatctcaagaagatcctttgatcttttctacggggtctgacgctcagtggaacgaaaactcacgttaagggattttggtcatgagattatcaaaaaggatcttcacctagatccttttaaattaaaaatgaagttttaaatcaatctaaagtatatatgagtaaacttggtctgacagttaccaatgcttaatcagtgaggcacctatctcagcgatctgtctatttcgttcatccatagttgcctgactccccgtcgtgtagataactacgatacgggagggcttaccatctggccccagtgctgcaatgataccgcgagacccacgctcaccggctccagatttatcagcaataaaccagccagccggaagggccgagcgcagaagtggtcctgcaactttatccgcctccatccagtctattaattgttgccgggaagctagagtaagtagttcgccagttaatagtttgcgcaacgttgttgccattgctgcaggcatcgtggtgtcacgctcgtcgtttggtatggcttcattcagctccggttcccaacgatcaaggcgagttacatgatcccccatgttgtgcaaaaaagcggttagctccttcggtcctccgatcgttgtcagaagtaagttggccgcagtgttatcactcatggttatggcagcactgcataattctcttactgtcatgccatccgtaagatgcttttctgtgactggtgagtactcaaccaagtcattctgagaatagtgtatgcggcgaccgagttgctcttgcccggcgtcaacacgggataataccgcgccacatagcagaactttaaaagtgctcatcattggaaaacgttcttcggggcgaaaactctcaaggatcttaccgctgttgagatccagttcgatgtaacccactcgtgcacccaactgatcttcagcatcttttactttcaccagcgtttctgggtgagcaaaaacaggaaggcaaaatgccgcaaaaaagggaataagggcgacacggaaatgttgaatactcatactcttcctttttcaatattattgaagcatttatcagggttattgtctcatgagcggatacatatttgaatgtatttagaaaaataaacaaataggggttccgcgcacatttccccgaaaagtgccacctgtctagctacgatatcctgtttaaacatcatcaataatataccttatagatggaatggtgccaatatgtaaatgaggtgattttaaaaagtgtgggccgtgtggtgattggctgtggggttaacggttaaaaggggcggcgcggccgtgggaaaatgacgttttatgggggtggagtttatttaaatataacttcgtatagcatacattatacgaagttatggatccttttgcaagttgtcgcgggaaatgttacgcataaaaaggcttcttttctcacggaactacttagttttcccacggtatttaacaggaaatgaggtagttttgaccggatgcaagtgaaaattgctgattttcgcgcgaaaactgaatgaggaagtgtttttctgaataatgtggtatttatggcagggtggagtatttgttcagggccaggtagactttgacccattacgtggaggtttcgattaccgtgttttttacctgaatttccgcgtaccgtgtcaaagtcttctgtttttacgtaggtgtcagctgatcgctagggtatttataacttcgtatagcatacattatacgaagttatatttaaataggaatgtttatgccttaccagtgtaacatgaatcatgtgaaagtgttgttggaaccagatgccttttccagaatgagcctaacaggaatctttgacatgaacacgcaaatctggaagatcctgaggtatgatgatacgagatcgagggtgcgcgcatgcgaatgcggaggcaagcatgccaggttccagccggtgtgtgtagatgtgaccgaagatctcagaccggatcatttggttattgcccgcactggagcagagttcggatccagtggagaagaaactgactaaggtgagtattgggaaaactttggggtgggattttcagatggacagattgagtaaaaatttgttttttctgtcttgcagctgacatgagtggaaatgcttcttttaaggggggagtcttcagcccttatctgacagggcgtctcccatcctgggcaggagttcgtcagaatgttatgggatctactgtggatggaagacccgttcaacccgccaattcttcaacgctgacctatgctactttaagttcttcacctttggacgcagctgcagccgctgccgccgcctctgtcgccgctaacactgtgcttggaatgggttactatggaagcatcgtggctaattccacttcctctaataacccttctacactgactcaggacaagttacttgtccttttggcccagctggaggctttgacccaacgtctgggtgaactttctcagcaggtggccgagttgcgagtacaaactgagtctgctgtcggcacggcaaagtctaaataaaaaaaattccagaatcaatgaataaataaacgagcttgttgttgatttaaaatcaagtgtttttatttcatttttcgcgcacggtatgccctggaccaccgatctcgatcattgagaactcggtggattttttccagaatcctatagaggtgggattgaatgtttagatacatgggcattaggccgtctttggggtggagatagctccattgaagggattcatgctccggggtagtgttgtaaatcacccagtcataacaaggtcgcagtgcatggtgttgcacaatatcttttagaagtaggctgattgccacagataagcccttggtgtaggtgtttacaaaccggttgagctgggaggggtgcattcgaggtgaaattatgtgcattttggattggatttttaagttggcaatattgccgccaagatcccgtcttgggttcatgttatgaaggactaccaagacggtgtatccggtacatttaggaaatttatcgtgcagcttggatggaaaagcgtggaaaaatttggagacacccttgtgtcctccgagattttccatgcactcatccatgataatagcaatggggccgtgggcagcggcgcgggcaaacacgttccgtgggtctgacacatcatagttatgttcctgagttaaatcatcataagccattttaatgaatttggggcggagcgtaccagattggggtatgaatgttccttcgggccccggagcatagttcccctcacagatttgcatttcccaagctttcagttctgagggtggaatcatgtccacctggggggctatgaagaacaccgtttcgggggcgggggtgattagttgggatgatagcaagtttctgagcaattgagatttgccacatccggtggggccataaataattccgattacaggttgcaggtggtagtttagggaacggcaactgccgtcttctcgaagcaagggggccacctcgttcatcatttcccttacatgcatattttcccgcaccaaatccattaggaggcgctctcctcctagtgatagaagttcttgtagtgaggaaaagtttttcagcggttttagaccgtcagccatgggcattttggaaagagtttgctgcaaaagttctagtctgttccacagttcagtgatgtgttctatggcatctcgatccagcagacctcctcgtttcgcgggtttggacggctcctggagtagggtatgagacgatgggcgtccagcgctgccagggttcggtccttccagggtctcagtgttcgagtcagggttgtttccgtcacagtgaaggggtgtgcgcctgcttgggcgcttgccagggtgcgcttcagactcattctgctggtggagaacttctgtcgcttggcgccctgtatgtcggccaagtagcagtttaccatgagttcgtagttgagcgcctcggctgcgtggcctttggcgcggagcttacctttggaagttttcttgcataccgggcagtataggcatttcagcgcatacagcttgggcgcaaggaaaatggattctggggagtatgcatccgcgccgcaggaggcgcaaacagtttcacattccaccagccaggttaaatccggttcattggggtcaaaaacaagttttccgccatattttttgatgcgtttcttacctttggtctccataagttcgtgtcctcgttgagtgacaaacaggctgtccgtatctccgtagactgattttacaggcctcttctccagtggagtgcctcggtcttcttcgtacaggaactctgaccactctgatacaaaggcgcgcgtccaggccagcacaaaggaggctatgtgggaggggtagcgatcgttgtcaaccagggggtccaccttttccaaagtatgcaaacacatgtcaccctcttcaacatccaggaatgtgattggcttgtaggtgtatttcacgtgacctggggtccccgctgggggggtataaaagggggcggttctttgctcttcctcactgtcttccggatcgctgtccaggaacgtcagctgttggggtaggtattccctctcgaaggcgggcatgacctctgcactcaggttgtcagtttctaagaacgaggaggatttgatattgacagtgccggttgagatgcctttcatgaggttttcgtccatttggtcagaaaacacaatttttttattgtcaagtttggtggcaaatgatccatacagggcgttggataaaagtttggcaatggatcgcatggtttggttcttttccttgtccgcgcgctctttggcggcgatgttgagttggacatactcgcgtgccaggcacttccattcggggaagatagttgttaattcatctggcacgattctcacttgccaccctcgattatgcaaggtaattaaatccacactggtggccacctcgcctcgaaggggttcattggtccaacagagcctacctcctttcctagaacagaaagggggaagtgggtctagcataagttcatcgggagggtctgcatccatggtaaagattcccggaagtaaatccttatcaaaatagctgatgggagtggggtcatctaaggccatttgccattctcgagctgccagtgcgcgctcatatgggttaaggggactgccccagggcatgggatgggtgagagcagaggcatacatgccacagatgtcatagacgtagatgggatcctcaaagatgcctatgtaggttggatagcatcgcccccctctgatacttgctcgcacatagtcatatagttcatgtgatggcgctagcagccccggacccaagttggtgcgattgggtttttctgttctgtagacgatctggcgaaagatggcgtgagaattggaagagatggtgggtctttgaaaaatgttgaaatgggcatgaggtagacctacagagtctctgacaaagtgggcataagattcttgaagcttggttaccagttcggcggtgacaagtacgtctagggcgcagtagtcaagtgtttcttgaatgatgtcataacctggttggtttttcttttcccacagttcgcggttgagaaggtattcttcgcgatccttccagtactcttctagcggaaacccgtctttgtctgcacggtaagatcctagcatgtagaactgattaactgccttgtaagggcagcagcccttctctacgggtagagagtatgcttgagcagcttttcgtagcgaagcgtgagtaagggcaaaggtgtctctgaccatgactttgagaaattggtatttgaagtccatgtcgtcacaggctccctgttcccagagttggaagtctacccgtttcttgtaggcggggttgggcaaagcgaaagtaacatcattgaagagaatcttaccggctctgggcataaaattgcgagtgatgcggaaaggctgtggtacttccgctcgattgttgatcacctgggcagctaggacgatttcgtcgaaaccgttgatgttgtgtcctacgatgtataattctatgaaacgcggcgtgcctctgacgtgaggtagcttactgagctcatcaaaggttaggtctgtggggtcagataaggcgtagtgttcgagagcccattcgtgcaggtgaggatttgcatgtaggaatgatgaccaaagatctaccgccagtgctgtttgtaactggtcccgatactgacgaaaatgccggccaattgccattttttctggagtgacacagtagaaggttctggggtcttgttgccatcgatcccacttgagtttaatggctagatcgtgggccatgttgacgagacgctcttctcctgagagtttcatgaccagcatgaaaggaactagttgtttgccaaaggatcccatccaggtgtaagtttccacatcgtaggtcaggaagagtctttctgtgcgaggatgagagccgatcgggaagaactggatttcctgccaccagttggaggattggctgttgatgtgatggaagtagaagtttctgcggcgcgccgagcattcgtgtttgtgcttgtacagacggccgcagtagtcgcagcgttgcacgggttgtatctcgtgaatgagctgtacctggcttcccttgacgagaaatttcagtgggaagccgaggcctggcgattgtatctcgtgctcttctatattcgctgtatcggcctgttcatcttctgtttcgatggtggtcatgctgacgagcccccgcgggaggcaagtccagacctcggcgcgggaggggcggagctgaaggacgagagcgcgcaggctggagctgtccagagtcctgagacgctgcggactcaggttagtaggtagggacagaagattaacttgcatgatcttttccagggcgtgcgggaggttcagatggtacttgatttccacaggttcgtttgtagagacgtcaatggcttgcagggttccgtgtcctttgggcgccactaccgtacctttgttttttcttttgatcggtggtggctctcttgcttcttgcatgctcagaagcggtgacggggacgcgcgccgggcggcagcggttgttccggacccgggggcatggctggtagtggcacgtcggcgccgcgcacgggcaggttctggtattgcgctctgagaagacttgcgtgcgccaccacgcgtcgattgacgtcttgtatctgacgtctctgggtgaaagctaccggccccgtgagcttgaacctgaaagagagttcaacagaatcaatttcggtatcgttaacggcagcttgtctcagtatttcttgtacgtcaccagagttgtcctggtaggcgatctccgccatgaactgctcgatttcttcctcctgaagatctccgcgacccgctctttcgacggtggccgcgaggtcattggagatacggcccatgagttgggagaatgcattcatgcccgcctcgttccagacgcggctgtaaaccacggccccctcggagtctcttgcgcgcatcaccacctgagcgaggttaagctccacgtgtctggttaagaccgcatagttgcataggcgctgaaaaaggtagttgagtgtggtggcaatgtgttcggcgacgaagaaatacatgatccatcgtctcagcggcatttcgctaacatcgcccagagcttccaagcgctccatggcctcgtagaagtccacggcaaaattaaaaaactgggagtttcgcgcggacacggtcaattcctcctcgagaagacggatgagttcggctatggtggcccgtacttcgcgttcgaaggctcccgggatctcttcttcctcttctatctcttcttccactaacatctcttcttcgtcttcaggcgggggcggagggggcacgcggcgacgtcgacggcgcacgggcaaacggtcgatgaatcgttcaatgacctctccgcggcggcggcgcatggtttcagtgacggcgcggccgttctcgcgcggtcgcagagtaaaaacaccgccgcgcatctccttaaagtggtgactgggaggttctccgtttgggagggagagggcgctgattatacattttattaattggcccgtagggactgcgcgcagagatctgatcgtgtcaagatccacgggatctgaaaacctttcgacgaaagcgtctaaccagtcacagtcacaaggtaggctgagtacggcttcttgtgggcgggggtggttatgtgttcggtctgggtcttctgtttcttcttcatctcgggaaggtgagacgatgctgctggtgatgaaattaaagtaggcagttctaagacggcggatggtggcgaggagcaccaggtctttgggtccggcttgctggatacgcaggcgattggccattccccaagcattatcctgacatctagcaagatctttgtagtagtcttgcatgagccgttctacgggcacttcttcctcacccgttctgccatgcatacgtgtgagtccaaatccgcgcattggttgtaccagtgccaagtcagctacgactctttcggcgaggatggcttgctgtacttgggtaagggtggcttgaaagtcatcaaaatccacaaagcggtggtaagcccctgtattaatggtgtaagcacagttggccatgactgaccagttaactgtctggtgaccagggcgcacgagctcggtgtatttaaggcgcgaataggcgcgggtgtcaaagatgtaatcgttgcaggtgcgcaccagatactggtaccctataagaaaatgcggcggtggttggcggtagagaggccatcgttctgtagctggagcgccaggggcgaggtcttccaacataaggcggtgatagccgtagatgtacctggacatccaggtgattcctgcggcggtagtagaagcccgaggaaactcgcgtacgcggttccaaatgttgcgtagcggcatgaagtagttcattgtaggcacggtttgaccagtgaggcgcgcgcagtcattgatgctctatagacacggagaaaatgaaagcgttcagcgactcgactccgtagcctggaggaacgtgaacgggttgggtcgcggtgtaccccggttcgagacttgtactcgagccggccggagccgcggctaacgtggtattggcactcccgtctcgacccagcctacaaaaatccaggatacggaatcgagtcgttttgctggtttccgaatggcagggaagtgagtcctatttttttttttttttgccgctcagaatgcatcccgtgctgcgacagatgcgcccccaacaacagcccccctcgcagcagcagcagcagcaaccacaaaaggctgtccctgcaactactgcaactgccgccgtgagcggtgcgggacagcccgcctatgatctggacttggaagagggcgaaggactggcacgtctaggtgcgccttcgcccgagcggcatccgcgagttcaactgaaaaaagattctcgcgaggcgtatgtgccccaacagaacctatttagagacagaagcggcgaggagccggaggagatgcgagcttcccgctttaacgcgggtcgtgagctgcgtcacggtttggaccgaagacgagtgttgcgagacgaggatttcgaagttgatgaagtgacagggatcagtcctgccagggcacacgtggctgcagccaaccttgtatcggcttacgagcagacagtaaaggaagagcgtaacttccaaaagtcttttaataatcatgtgcgaaccctgattgcccgcgaagaagttacccttggtttgatgcatttgtgggatttgatggaagctatcattcagaaccctactagcaaacctctgaccgcccagctgtttctggtggtgcaacacagcagagacaatgaggctttcagagaggcgctgctgaacatcaccgaacccgaggggagatggttgtatgatcttatcaacattctacagagtatcatagtgcaggagcggagcctgggcctggccgagaaggtagctgccatcaattactcggttttgagcttgggaaaatattacgctcgcaaaatctacaagactccatacgttcccatagacaaggaggtgaagatagatgggttctacatgcgcatgacgctcaaggtcttgaccctgagcgatgatcttggggtgtatcgcaatgacagaatgcatcgcgcggttagcgccagcaggaggcgcgagttaagcgacagggaactgatgcacagtttgcaaagagctctgactggagctggaaccgagggtgagaattacttcgacatgggagctgacttgcagtggcagcctaatcgcagggctctgagcgccgcgacggcaggatgtgagcttccttacatagaagaggcggatgaaggcgaggaggaagagggcgagtacttggaagactgatggcacaacccgtgttttttgctagatggaacagcaagcaccggatcccgcaatgcgggcggcgctgcagagccagccgtccggcattaactcctcggacgattggacccaggccatgcaacgtatcatggcgttgacgactcgcaaccccgaagcctttagacagcaaccccaggccaaccgtctatcggccatcatggaagctgtagtgccttcccgatctaatcccactcatgagaaggtcctggccatcgtgaacgcgttggtggagaacaaagctattcgtccagatgaggccggactggtatacaacgctctcttagaacgcgtggctcgctacaacagtagcaatgtgcaaaccaatttggaccgtatgataacagatgtacgcgaagccgtgtctcagcgcgaaaggttccagcgtgatgccaacctgggttcgctggtggcgttaaatgctttcttgagtactcagcctgctaatgtgccgcgtggtcaacaggattatactaactttttaagtgctttgagactgatggtatcagaagtacctcagagcgaagtgtatcagtccggtcctgattacttctttcagactagcagacagggcttgcagacggtaaatctgagccaagcttttaaaaaccttaaaggtttgtggggagtgcatgccccggtaggagaaagagcaaccgtgtctagcttgttaactccgaactcccgcctgttattactgttggtagctcctttcaccgacagcggtagcatcgaccgtaattcctatttgggttacctactaaacctgtatcgcgaagccatagggcaaagtcaggtggacgagcagacctatcaagaaattacccaagtcagtcgcgctttgggacaggaagacactggcagtttggaagccactctgaacttcttgcttaccaatcggtctcaaaagatccctcctcaatatgctcttactgcggaggaggagaggatccttagatatgtgcagcagagcgtgggattgtttctgatgcaagagggggcaactccgactgcagcactggacatgacagcgcgaaatatggagcccagcatgtatgccagtaaccgacctttcattaacaaactgctggactacttgcacagagctgccgctatgaactctgattatttcaccaatgccatcttaaacccgcactggctgcccccacctggtttctacacgggcgaatatgacatgcccgaccctaatgacggatttctgtgggacgacgtggacagcgatgttttttcacctctttctgatcatcgcacgtggaaaaaggaaggcggtgatagaatgcattcttctgcatcgctgtccggggtcatgggtgctaccgcggctgagcccgagtctgcaagtccttttcctagtctacccttttctctacacagtgtacgtagcagcgaagtgggtagaataagtcgcccgagtttaatgggcgaagaggagtacctaaacgattccttgctcagaccggcaagagaaaaaaatttcccaaacaatggaatagaaagtttggtggataaaatgagtagatggaagacttatgctcaggatcacagagacgagcctgggatcatggggactacaagtagagcgagccgtagacgccagcgccatgacagacagaggggtcttgtgtgggacgatgaggattcggccgatgatagcagcgtgttggacttgggtgggagaggaaggggcaacccgtttgctcatttgcgccctcgcttgggtggtatgttgtgaaaaaaaataaaaaagaaaaactcaccaaggccatggcgacgagcgtacgttcgttcttctttattatctgtgtctagtataatgaggcgagtcgtgctaggcggagcggtggtgtatccggagggtcctcctccttcgtacgagagcgtgatgcagcagcagcaggcgacggcggtgatgcaatccccactggaggctccctttgtgcctccgcgatacctggcacctacggagggcagaaacagcattcgttactcggaactggcacctcagtacgataccaccaggttgtatctggtggacaacaagtcggcggacattgcttctctgaactatcagaatgaccacagcaacttcttgaccacggtggtgcagaacaatgactttacccctacggaagccagcacccagaccattaactttgatgaacgatcgcggtggggcggtcagctaaagaccatcatgcatactaacatgccaaacgtgaacgagtatatgtttagtaacaagttcaaagcgcgtgtgatggtgtccagaaaacctcccgacggtgctgcagttggggatacttatgatcacaagcaggatattttggaatatgagtggttcgagtttactttgccagaaggcaacttttcagttactatgactattgatttgatgaacaatgccatcatagataattacttgaaagtgggtagacagaatggagtgcttgaaagtgacattggtgttaagttcgacaccaggaacttcaagctgggatgggatcccgaaaccaagttgatcatgcctggagtgtatacgtatgaagccttccatcctgacattgtcttactgcctggctgcggagtggattttaccgagagtcgtttgagcaaccttcttggtatcagaaaaaaacagccatttcaagagggttttaagattttgtatgaagatttagaaggtggtaatattccggccctcttggatgtagatgcctatgagaacagtaagaaagaacaaaaagccaaaatagaagctgctacagctgctgcagaagctaaggcaaacatagttgccagcgactctacaagggttgctaacgctggagaggtcagaggagacaattttgcgccaacacctgttccgactgcagaatcattattggccgatgtgtctgaaggaacggacgtgaaactcactattcaacctgtagaaaaagatagtaagaatagaagctataatgtgttggaagacaaaatcaacacagcctatcgcagttggtatctttcgtacaattatggcgatcccgaaaaaggagtgcgttcctggacattgctcaccacctcagatgtcacctgcggagcagagcaggtttactggtcgcttccagacatgatgaaggatcctgtcactttccgctccactagacaagtcagtaactaccctgtggtgggtgcagagcttatgcccgtcttctcaaagagcttctacaacgaacaagctgtgtactcccagcagctccgccagtccacctcgcttacgcacgtcttcaaccgctttcctgagaaccagattttaatccgtccgccggcgcccaccattaccaccgtcagtgaaaacgttcctgctctcacagatcacgggaccctgccgttgcgcagcagtatccggggagtccaacgtgtgaccgttactgacgccagacgccgcacctgtccctacgtgtacaaggcactgggcatagtcgcaccgcgcgtcctttcaagccgcactttctaaaaaaaaaatgtccattcttatctcgcccagtaataacaccggttggggtctgcgcgctccaagcaagatgtacggaggcgcacgcaaacgttctacccaacatcccgtgcgtgttcgcggacattttcgcgctccatggggtgccctcaagggccgcactcgcgttcgaaccaccgtcgatgatgtaatcgatcaggtggttgccgacgcccgtaattatactcctactgcgcctacatctactgtggatgcagttattgacagtgtagtggctgacgctcgcaactatgctcgacgtaagagccggcgaaggcgcattgccagacgccaccgagctaccactgccatgcgagccgcaagagctctgctacgaagagctagacgcgtggggcgaagagccatgcttagggcggccagacgtgcagcttcgggcgccagcgccggcaggtcccgcaggcaagcagccgctgtcgcagcggcgactattgccgacatggcccaatcgcgaagaggcaatgtatactgggtgcgtgacgctgccaccggtcaacgtgtacccgtgcgcacccgtccccctcgcacttagaagatactgagcagtctccgatgttgtgtcccagcggcgaggatgtccaagcgcaaatacaaggaagaaatgctgcaggttatcgcacctgaagtctacggccaaccgttgaaggatgaaaaaaaaccccgcaaaatcaagcgggttaaaaaggacaaaaaagaagaggaagatggcgatgatgggctggcggagtttgtgcgcgagtttgccccacggcgacgcgtgcaatggcgtgggcgcaaagttcgacatgtgttgagacctggaacttcggtggtctttacacccggcgagcgttcaagcgctacttttaagcgttcctatgatgaggtgtacggggatgatgatattcttgagcaggcggctgaccgattaggcgagtttgcttatggcaagcgtagtagaataacttccaaggatgagacagtgtcaatacccttggatcatggaaatcccacccctagtcttaaaccggtcactttgcagcaagtgttacccgtaactccgcgaacaggtgttaaacgcgaaggtgaagatttgtatcccactatgcaactgatggtacccaaacgccagaagttggaggacgttttggagaaagtaaaagtggatccagatattcaacctgaggttaaagtgagacccattaagcaggtagcgcctggtctgggggtacaaactgtagacattaagattcccactgaaagtatggaagtgcaaactgaacccgcaaagcctactgccacctccactgaagtgcaaacggatccatggatgcccatgcctattacaactgacgccgccggtcccactcgaagatcccgacgaaagtacggtccagcaagtctgttgatgcccaattatgttgtacacccatctattattcctactcctggttaccgaggcactcgctactatcgcagccgaaacagtacctcccgccgtcgccgcaagacacctgcaaatcgcagtcgtcgccgtagacgcacaagcaaaccgactcccggcgccctggtgcggcaagtgtaccgcaatggtagtgcggaacctttgacactgccgcgtgcgcgttaccatccgagtatcatcacttaatcaatgttgccgctgcctccttgcagatatggccctcacttgtcgccttcgcgttcccatcactggttaccgaggaagaaactcgcgccgtagaagagggatgttgggacgcggaatgcgacgctacaggcgacggcgtgctatccgcaagcaattgcggggtggttttttaccagccttaattccaattatcgctgctgcaattggcgcgataccaggcatagcttccgtggcggttcaggcctcgcaacgacattgacattggaaaaaaaacgtataaataaaaaaaaatacaatggactctgacactcctggtcctgtgactatgttttcttagagatggaagacatcaatttttcatccttggctccgcgacacggcacgaagccgtacatgggcacctggagcgacatcggcacgagccaactgaacgggggcgccttcaattggagcagtatctggagcgggcttaaaaattttggctcaaccataaaaacatacgggaacaaagcttggaacagcagtacaggacaggcgcttagaaataaacttaaagaccagaacttccaacaaaaagtagtcgatgggatagcttccggcatcaatggagtggtagatttggctaaccaggctgtgcagaaaaagataaacagtcgtttggacccgccgccagcaaccccaggtgaaatgcaagtggaggaagaaattcctccgccagaaaaacgaggcgacaagcgtccgcgtcccgatttggaagagacgctggtgacgcgcgtagatgaaccgccttcttatgaggaagcaacgaagcttggaatgcccaccactagaccgatagccccaatggccaccggggtgatgaaaccttctcagttgcatcgacccgtcaccttggatttgccccctccccctgctgctactgctgtacccgcttctaagcctgtcgctgccccgaaaccagtcgccgtagccaggtcacgtcccgggggcgctcctcgtccaaatgcgcactggcaaaatactctgaacagcatcgtgggtctaggcgtgcaaagtgtaaaacgccgtcgctgcttttaattaaatatggagtagcgcttaacttgcctatctgtgtatatgtgtcattacacgccgtcacagcagcagaggaaaaaaggaagaggtcgtgcgtcgacgctgagttactttcaagatggccaccccatcgatgctgccccaatgggcatacatgcacatcgccggacaggatgcttcggagtacctgagtccgggtctggtgcagttcgcccgcgccacagacacctacttcaatctgggaaataagtttagaaatcccaccgtagcgccgacccacgatgtgaccaccgaccgtagccagcggctcatgttgcgcttcgtgcccgttgaccgggaggacaatacatactcttacaaagtgcggtacaccctggccgtgggcgacaacagagtgctggatatggccagcacgttctttgacattaggggcgtgttggacagaggtcccagtttcaaaccctattctggtacggcttacaactctctggctcctaaaggcgctccaaatgcatctcaatggattgcaaaaggcgtaccaactgcagcagccgcaggcaatggtgaagaagaacatgaaacagaggagaaaactgctacttacacttttgccaatgctcctgtaaaagccgaggctcaaattacaaaagagggcttaccaataggtttggagatttcagctgaaaacgaatctaaacccatctatgcagataaactttatcagccagaacctcaagtgggagatgaaacttggactgacctagacggaaaaaccgaagagtatggaggcagggctctaaagcctactactaacatgaaaccctgttacgggtcctatgcgaagcctactaatttaaaaggtggtcaggcaaaaccgaaaaactcggaaccgtcgagtgaaaaaattgaatatgatattgacatggaattttttgataactcatcgcaaagaacaaacttcagtcctaaaattgtcatgtatgcagaaaatgtaggtttggaaacgccagacactcatgtagtgtacaaacctggaacagaagacacaagttccgaagctaatttgggacaacagtctatgcccaacagacccaactacattggcttcagagataactttattggactcatgtactataacagtactggtaacatgggggtgctggctggtcaagcgtctcagttaaatgcagtggttgacttgcaggacagaaacacagaactttcttaccaactcttgcttgactctctgggcgacagaaccagatactttagcatgtggaatcaggctgtggacagttatgatcctgatgtacgtgttattgaaaatcatggtgtggaagatgaacttcccaactattgttttccactggacggcataggtgttccaacaaccagttacaaatcaatagttccaaatggagaagataataataattggaaagaacctgaagtaaatggaacaagtgagatcggacagggtaatttgtttgccatggaaattaaccttcaagccaatctatggcgaagtttcctttattccaatgtggctctgtatctcccagactcgtacaaatacaccccgtccaatgtcactcttccagaaaacaaaaacacctacgactacatgaacgggcgggtggtgccgccatctctagtagacacctatgtgaacattggtgccaggtggtctctggatgccatggacaatgtcaacccattcaaccaccaccgtaacgctggcttgcgttaccgatctatgcttctgggtaacggacgttatgtgcctttccacatacaagtgcctcaaaaattcttcgctgttaaaaacctgctgcttctcccaggctcctacacttatgagtggaactttaggaaggatgtgaacatggttctacagagttccctcggtaacgacctgcgggtagatggcgccagcatcagtttcacgagcatcaacctctatgctacttttttccccatggctcacaacaccgcttccacccttgaagccatgctgcggaatgacaccaatgatcagtcattcaacgactacctatctgcagctaacatgctctaccccattcctgccaatgcaaccaatattcccatttccattccttctcgcaactgggcggctttcagaggctggtcatttaccagactgaaaaccaaagaaactccctctttggggtctggatttgacccctactttgtctattctggttctattccctacctggatggtaccttctacctgaaccacacttttaagaaggtttccatcatgtttgactcttcagtgagctggcctggaaatgacaggttactatctcctaacgaatttgaaataaagcgcactgtggatggcgaaggctacaacgtagcccaatgcaacatgaccaaagactggttcttggtacagatgctcgccaactacaacatcggctatcagggcttctacattccagaaggatacaaagatcgcatgtattcatttttcagaaacttccagcccatgagcaggcaggtggttgatgaggtcaattacaaagacttcaaggccgtcgccataccctaccaacacaacaactctggctttgtgggttacatggctccgaccatgcgccaaggtcaaccctatcccgctaactatccctatccactcattggaacaactgccgtaaatagtgttacgcagaaaaagttcttgtgtgacagaaccatgtggcgcataccgttctcgagcaacttcatgtctatgggggcccttacagacttgggacagaatatgctctatgccaactcagctcatgctctggacatgacctttgaggtggatcccatggatgagcccaccctgctttatcttctcttcgaagttttcgacgtggtcagagtgcatcagccacaccgcggcatcatcgaggcagtctacctgcgtacaccgttctcggccggtaacgctaccacgtaagaagcttcttgcttcttgcaaatagcagctgcaaccatggcctgcggatcccaaaacggctccagcgagcaagagctcagagccattgtccaagacctgggttgcggaccctattttttgggaacctacgataagcgcttcccggggttcatggcccccgataagctcgcctgtgccattgtaaatacggccggacgtgagacggggggagagcactggttggctttcggttggaacccacgttctaacacctgctacctttttgatccttttggattctcggatgatcgtctcaaacagatttaccagtttgaatatgagggtctcctgcgccgcagcgctcttgctaccaaggaccgctgtattacgctggaaaaatctacccagaccgtgcagggcccccgttctgccgcctgcggacttttctgctgcatgttccttcacgcctttgtgcactggcctgaccgtcccatggacggaaaccccaccatgaaattgctaactggagtgccaaacaacatgcttcattctcctaaagtccagcccaccctgtgtgacaatcaaaaagcactctaccattttcttaatacccattcgccttattttcgctctcatcgtacacacatcgaaagggccactgcgttcgaccgtatggatgttcaataatgactcatgtaaacaacgtgttcaataaacatcactttatttttttacatgtatcaaggctctggattacttatttatttacaagtcgaatgggttctgacgagaatcagaatgacccgcaggcagtgatacgttgcggaactgatacttgggttgccacttgaattcgggaatcaccaacttgggaaccggtatatcgggcaggatgtcactccacagctttctggtcagctgcaaagctccaagcaggtcaggagccgaaatcttgaaatcacaattaggaccagtgctctgagcgcgagagttgcggtacaccggattgcagcactgaaacaccatcagcgacggatgtctcacgcttgccagcacggtgggatctgcaatcatgcccacatccagatcttcagcattggcaatgctgaacggggtcatcttgcaggtctgcctacccatggcgggcacccaattaggcttgtggttgcaatcgcagtgcagggggatcagtatcatcttggcctgatcctgtctgattcctggatacacggctctcatgaaagcatcatattgcttgaaagcctgctgggctttactaccctcgggataaaacatcccgcaggacctgctcgaaaactggttagcctgcacagccggcatcattcacacagcagcgggcgtcattgttggctatttgcaccacacttctgccccagcggttttgggtgattttggttcgctcgggattctcctttaaggctcgttgtccgttctcgctggccacatccatctcgataatctgctccttctgaatcataatattgccatgcaggcacttcagcttgccctcataatcattgcagccatgaggccacaacgcacagcctgtacattcccaattatggtgggcgatctgagaaaaagaatgtatcattccctgcagaaatcttcccatcatcgtgctcagtgtcttgtgactagtgaaagttaactggatgcctcggtgctcttcgtttacgtactggtgacagatgcgcttgtattgttcgtgttgctcaggcattagtttaaaacaggttctaagttcgttatccagcctgtacttctccatcagcagacacatcacttccatgcctttctcccaagcagacaccaggggcaagctaatcggattcttaacagtgcaggcagcagctcctttagccagagggtcatctttagcgatcttctcaatgcttcttttgccatccttctcaacgatgcgcacgggcgggtagctgaaacccactgctacaagttgcgcctcttctctttcttcttcgctgtcttgactgatgtcttgcatggggatatgtttggtcttccttggcttctttttggggggtatcggaggaggaggactgtcgctccgttccggagacagggaggattgtgacgtttcgctcaccattaccaactgactgtcggtagaagaacctgaccccacacggcgacaggtgtttttcttcgggggcagaggtggaggcgattgcgaagggctgcggtccgacctggaaggcggatgactggcagaaccccttccgcgttcgggggtgtgctccctgtggcggtcgcttaactgatttccttcgcggctggccattgtgttctcctaggcagagaaacaacagacatggaaactcagccattgctgtcaacatcgccacgagtgccatcacatctcgtcctcagcgacgaggaaaaggagcagagcttaagcattccaccgcccagtcctgccaccacctctaccctagaagataaggaggtcgacgcatctcatgacatgcagaataaaaaagcgaaagagtctgagacagacatcgagcaagacccgggctatgtgacaccggtggaacacgaggaagagttgaaacgctttctagagagagaggatgaaaactgcccaaaacagcgagcagataactatcaccaagatgctggaaatagggatcagaacaccgactacctcatagggcttgacggggaagacgcgctccttaaacatctagcaagacagtcgctcatagtcaaggatgcattattggacagaactgaagtgcccatcagtgtggaagagctcagctgcgcctacgagcttaaccttttttcacctcgtactccccccaaacgtcagccaaacggcacctgcgagccaaatcctcgcttaaacttttatccagcttttgctgtgccagaagtactggctacctatcacatcttttttaaaaatcaaaaaattccagtctcctgccgcgctaatcgcacccgcgccgatgccctactcaatctgggacctggttcacgcttacctgatatagcttccttggaagaggttccaaagatcttcgagggtctgggcaataatgagactcgggccgcaaatgctctgcaaaagggagaaaatggcatggatgagcatcacagcgttctggtggaattggaaggcgataatgccagactcgcagtactcaagcgaagcgtcgaggtcacacacttcgcatatcccgctgtcaacctgccccctaaagtcatgacggcggtcatggaccagttactcattaagcgcgcaagtcccctttcagaagacatgcatgacccagatgcctgtgatgagggtaaaccagtggtcagtgatgagcagctaacccgatggctgggcaccgactctccccgggatttggaagagcgtcgcaagcttatgatggccgtggtgctggttaccgtagaactagagtgtctccgacgtttctttaccgattcagaaaccttgcgcaaactcgaagagaatctgcactacacttttagacacggctttgtgcggcaggcatgcaagatatctaacgtggaactcaccaacctggtttcctacatgggtattctgcatgagaatcgcctaggacaaagcgtgctgcacagcacccttaagggggaagcccgccgtgattacatccgcgattgtgtctatctctacctgtgccacacgtggcaaaccggcatgggtgtatggcagcaatgtttagaagaacagaacttgaaagagcttgacaagctcttacagaaatctcttaaggttctgtggacagggttcgacgagcgcaccgtcgcttccgacctggcagacctcatcttcccagagcgtctcagggttactttgcgaaacggattgcctgactttatgagccagagcatgcttaacaattttcgctctttcatcctggaacgctccggtatcctgcccgccacctgctgcgcactgccctccgactttgtgcctctcacctaccgcgagtgccccccgccgctatggagtcactgctacctgttccgtctggccaactatctctcctaccactcggatgtgatcgaggatgtgagcggagacggcttgctggagtgccactgccgctgcaatctgtgcacgccccaccggtccctagcttgcaacccccagttgatgagcgaaacccagataataggcacctttgaattgcaaggccccagcagccaaggcgatgggtcttctcctgggcaaagtttaaaactgaccccgggactgtggacctccgcctacttgcgcaagtttgctccggaagattaccacccctatgaaatcaagttctatgaggaccaatcacagcctccaaaggccgaactttcggcttgcgtcatcacccagggggcaattctggcccaattgcaagccatccaaaaatcccgccaagaatttctactgaaaaagggtaagggggtctaccttgacccccagaccggcgaggaactcaacacaaggttccctcaggatgtcccaacgacgagaaaacaagaagttgaaggtgcagccgccgcccccagaagatatggaggaagattgggacagtcaggcagaggaggcggaggaggacagtctggaggacagtctggaggaagacagtttggaggaggaaaacgaggaggcagaggaggtggaagaagtaaccgccgacaaacagttatcctcggctgcggagacaagcaacagcgctaccatctccgctccgagtcgaggaacccggcggcgtcccagcagtagatgggacgagaccggacgcttcccgaacccaaccagcgcttccaagaccggtaagaaggatcggcagggatacaagtcctggcgggggcataagaatgccatcatctcctgcttgcatgagtgcgggggcaacatatccttcacgcggcgctacttgctattccaccatggggtgaactttccgcgcaatgttttgcattactaccgtcacctccacagcccctactatagccagcaaatcccgacagtctcgacagataaagacagcggcggcgacctccaacagaaaaccagcagcggcagttagaaaatacacaacaagtgcagcaacaggaggattaaagattacagccaacgagccagcgcaaacccgagagttaagaaatcggatctttccaaccctgtatgccatcttccagcagagtcggggtcaagagcaggaactgaaaataaaaaaccgatctctgcgttcgctcaccagaagttgtttgtatcacaagagcgaagatcaacttcagcgcactctcgaggacgccgaggctctcttcaacaagtactgcgcgctgactcttaaagagtaggcagcgaccgcgcttattcaaaaaaggcgggaattacatcatcctcgacatgagtaaagaaattcccacgccttacatgtggagttatcaaccccaaatgggattggcagcaggcgcctcccaggactactccacccgcatgaattggctcagcgccgggccttctatgatttctcgagttaatgatatacgcgcctaccgaaaccaaatacttttggaacagtcagctcttaccaccacgccccgccaacaccttaatcccagaaattggcccgccgccctagtgtaccaggaaagtcccgctcccaccactgtattacttcctcgagacgcccaggccgaagtccaaatgactaatgcaggtgcgcagttagctggcggctccaccctatgtcgtcacaggcctcggcataatataaaacgcctgatgatcagaggccgaggtatccagctcaacgacgagtcggtgagctctccgcttggtctacgaccagacggaatctttcagattgccggctgcgggagatcttccttcacccctcgtcaggctgttctgactttggaaagttcgtcttcgcaaccccgctcgggcggaatcgggaccgttcaatttgtagaggagtttactccctctgtctacttcaaccccttctccggatctcctgggcactacccggacgagttcataccgaacttcgacgcgattagcgagtcagtggacggctacgattgatgtctggtgacgcggctgagctatctcggctgcgacatctagaccactgccgccgctttcgctgctttgcccgggaacttattgagttcatctacttcgaactccccaaggatcaccctcaaggtccggcccacggagtgcggattactatcgaaggcaaaatagactctcgcctgcaacgaattttctcccagcggcccgtgctgatcgagcgagaccagggaaacaccacggttagtaatcaattacggggtcattagttcatagcccatatatggagttgcgatcgctgcgggccatgtcatacaccgccttcagagcagccggacctatctgcccgttcgtgccgtcgttgttaatcaccacatggttattctgctcaaacgtcccggacgcctgcgaccggctgtctgccatgctgcccggtgtaccgacataaccgccggtggcatagccgcgcatcagccggtaaagattccccacgccaatccggctggttgcctccttcgtgaagacaaactcaccacggtgaacaatccccgctggctcatatttgccgccggttcccgtaaatcctccggttgcaaaatggaatttcgccgcagcggcctgaatggctgtaccgcctgacgcggatgcgccgccaccaacagccccgccaatggcgctgccgatactcccgacaatccccaccattgcctgcttaagcagaatttctgtcatcatggacagcacggaacgggtgaagctgcgccagttctgctcactgccggtcagcatcgccgccatattctgtgcaataccatcaaaggtctgcgtggctgcactttttacctgcgacatactgtccgtggcgctctcttcccactcactccagccggacttcaggcctgccatccagttcccgcgaagctggtcttcagccgcccaggtctttttctgctctgacatgacgttattcagcgccagcggattatcgccatactgttccttcaggcgctgttccgtggcttcccgttctgcctgccggtcagtcagcccccggcttttcgcatcaatggcggcccgttttgcccgttgctgctgtgcgaatttatccgcctgctgcgccagcgcgttcaggcgctcctgatacgtaaccttgtcgccaagtgcagccagctggcgtttgtactccagcgtctcatctttatgcgccagcagggatttctcctgtgcagacagctggcgacgttgcgccgcctcctccagtaccgcgaactgactctccgccttccacaaatcccggcgctgctggctgattttctcatttgctccggcatgcttctccagcgtccggagttctgcctgaagcgtcagcagggcagcatgagcactgtcttcctgacgatcgcccgcagacaccttcacgctggactgtttcggctttttcagcgtcgcttcataatcctttttcgccgccgccatcagcgtgttgtaatccgcctgcaggattttcccgtctttcagtgccttgttcagttcttcctgacgggcggtatatttctccagcggcgtctgcagccgttcgtaagccttctgcgcctcttcggtatatttcagccgtgacgcttcggtatcgctctgctgctgcgcatttttgtcctgttgagtctgctgctcagccttctttcgggcggcttcaagcgcaagacgggccttttcacgatcatcccagtaacgcgcccgcgcttcatcgttaacaaaataatcatccttgcgcagattccagatgtcgtctgctttcttatacgcagcctctgccttaatcagcatctcctgcgcggtatcaggacgaccaatatccagcaccgcatcccacatggatttgaatgcccgcgcagtcctgtctgcccaggtctccagcgtgcccatgttctctttcaggcggcgggtctggtcatcaaaccctttcgttgcggcctcgttcgccgcctgcaatgccccggcttcatcgccggaacgctgcaactgagcaacatacgcaatctgctccgccgacacgttatggaactggcgagccatcgccgtcagccccgacgtcgggtctgtggtcagcttcccgaaggcttcagcgaccttgtccacctccacgccggatgcagaggagaaacgcgccacactctggctgatggacgcaatctgagcctcaccgcttacccccgccttaaccagtgcgctgagtgactcgctggtctggttaaacgtcagccctgccgcctgcccggctctggacaggaccagcatacgatctgccgtcagtcccgcctgattgccggaaaggaccagcgttttgttgaaatcggacagggttgagttgccctgataccaggcatacgccagcgcaccggtcgccaccgccagcgaggtggcccccaccatcggcagggtgatcgcaccggcaagccccctgaacatggggatcatcccgccgaaggagtccttcacctgccccccctgttgcagcaggatcagccacggactttgcccgcctgcaagctgcgtggccacgtcggtgaactgtgcaggcagcatacgcatggcggctttatactgcccgacggaaatccccgctttctgtgcagccagcgcctgtcggctcagcgactgttcaacgactgccgctgtttttttcgcatcactttccgtaccagaaaaatgacgcctgactctggccatctgctcgtcaaatctggccgcatccagactcaaatcaacgacgtcgactaagctctagcatttgtgaaccatcaccctaatcaagttttttggggtcgaggtgccgtaaagcactaaatcggaaccctaaagggagcccccgatttagagcttgacggggaaagccggcgaacgtggcgagaaaggaagggaagaaagcgaaaggagcgggcgctagggcgctggcaagtgtagcggtcacgctgcgcgtaaccaccacacccgccgcgcttaatgcgccgctacagggcgcgtggggataccccctagagccccagctggttctttccgcctcagaagccatagagcccaccgcatccccagcatgcctgctattgtcttcccaatcctcccccttgctgtcctgccccaccccaccccccagaatagaatgacacctactcagacaatgcgatgcaatttcctcattttattaggaaaggacagtgggagtggcaccttccagggtcaaggaaggcacgggggaggggcaaacaacagatggctggcaactagaaggcacagtcgaggctgatcagcgggtttgctagcttaggcgaaggcgatgggggtcttgaaggcgtgctggtactccacgatgcccagctcggtgttgctgtgcagctcctccacgcggcggaaggcgaacatggggcccccgttctgcaggatgctggggtggatggcgctcttgaagtgcatgtggctgtccaccacgaagctgtagtagccgccgtcgcgcaggctgaaggtgcgggcgaagctgcccaccagcacgttatcgcccatggggtgcaggtgctccacggtggcgttgctgcggatgatcttgtcggtgaagatcacgctgtcctcggggaagccggtgcccaccaccttgaagtcgccgatcacgcggccggcctcgtagcggtagctgaagctcacgtgcagcacgccgccgtcctcgtacttctcgatgcgggtgttggtgtagccgccgttgttgatggcgtgcaggaaggggttctcgtagccgctggggtaggtgccgaagtggtagaagccgtagcccatcacgtggctcagcaggtaggggctgaaggtcagggcgcctttggtgctcttcatcttgttggtcatgcggccctgctcgggggtgccctctccgccgcccaccagctcgaactccacgccgttcagggtgccggtgatgcggcactcgatcttcatggcgggcatggtggctagcctagccagcttgggtctccctatagtgagtcgtattaatttcgataagccagtaagcagtgggttctctagttagccagagagctctgcttatatagacctcccaccgtacacgcctaccgcccatttgcgtcaatggggcggagttgttacgacattttggaaagtcccgttgattttggtgccaaaacaaactcccattgacgtcaatggggtggagacttggaaatccccgtgagtcaaaccgctatccacgcccattgatgtactgccaaaaccgcatcaccatggtaatagcgatgactaatacgtagatgtactgccaagtaggaaagtcccataaggtcatgtactgggcataatgccaggcgggccatttaccgtcattgacgtcaatagggggcgtacttggcatatgatacacttgatgtactgccaagtgggcagtttaccgtaaatactccacccattgacgtcaatggaaagtccctattggcgttactatgggaacatacgtcattattgacgtcaatgggcgggggtcgttgggcggtcagccaggcgggccatttaccgtaagttatgtaacgcggaactccatatatgggctatgaactaatgaccccgtaattgattactattaataactacaataatcaatgtcaacgcgtatatctggcccgtacatcgcgaagcagcgcaaaacgcctaaccctaagcagattcttcatgcaattaagcttcgcggtgcttcttcagtacgctacggcaaatgtcatcgacgtttttatccggaaactgctgtctggctttttttgatttcagaattagcctgacgggcaatgctgcgaagggcgttttcctgctgaggtgtcattgaacaagtcccatgtcggcaagcataagcacacagaatatgaagcccgctgccagaaaaatgcattccgtggttgtcatacctggtttctctcatctgcttctgctttcgccaccatcatttccagcttttgtgaaagggatgcggctaacgtatgaaattcttcgtctgtttctactggtattggcacaaacctgattccaatttgagcaaggctatgtgccatctcgatactcgttcttaactcaacagaagatgctttgtgcatacagcccctcgtttattatttatctcctcagccagccgctgtgctttcagtggatttcggataacagaaaggccgggaaatacccagcctcgctttgtaacggagtagacgaaagtgattgcgcctacccggatattatcgtgaggatgcgtcatcgccattgctccccaaatacaaaaccaatttcagccagtgcctcgtccattttttcgatgaactccggcacgatctcgtcaaaactcgccatgtacttttcatcccgctcaatcacgacataatgcaggccttcacgcttcatacgcgggtcatagttggcaaagtaccaggcattttttcgcgtcacccacatgctgtactgcacctgggccatgtaagctgactttatggcctcgaaaccaccgagccggaacttcatgaaatcccgggaggtaaacgggcatttcagttcaaggccgttgccgtcactgcataaaccatcgggagagcaggcggtacgcatactttcgtcgcgatagatgatcggggattcagtaacattcacgccggaagtgaattcaaacagggttctggcgtcgttctcgtactgttttccccaggccagtgctttagcgttaacttccggagccacaccggtgcaaacctcagcaagcagggtgtggaagtaggacattttcatgtcaggccacttctttccggagcggggttttgctatcacgttgtgaacttctgaagcggtgatgacgccgagccgtaatttgtgccacgcatcatccccctgttcgacagctctcacatcgatcccggtacgctgcaggataatgtccggtgtcatgctgccaccttctgctctgcggctttctgtttcaggaatccaagagcttttactgcttcggcctgtgtcagttctgacgatgcacgaatgtcgcggcgaaatatctgggaacagagcggcaataagtcgtcatcccatgttttatccagggcgatcagcagagtgttaatctcctgcatggtttcatcgttaaccggagtgatgtcgcgttccggctgacgttctgcagtgtatgcagtattttcgacaatgcgctcggcttcatccttgtcatagataccagcaaatccgaagcggccgcggaacaacaacaattgcattcattttatgtttcaggttcagggggaggtgtggtcctgcgattccatcgagtgcacctacaccctgctgaagaccctatgcggcctaagagacctgctaccaatgaattaaaaaaaaatgattaataaaaaatcacttacttgaaatcagcaataaggtctctgttgaaattttctcccagcagcacctcacttccctcttcccaactctggtattctaaaccccgttcagcggcatactttctccatactttaaaggggatgtcaaattttagctcctctcctgtacccacaatcttcatgtctttcttcccagatgaccaagagagtccggctcagtgactccttcaaccctgtctacccctatgaagatgaaagcacctcccaacaccccttttataacccagggtttatttccccaaatggcttcacacaaagcccagacggagttcttactttaaaatgtttaaccccactaacaaccacaggcggatctctacagctaaaagtgggagggggacttacagtggatgacactgatggtaccttacaagaaaacatacgtgctacagcacccattactaaaaataatcactctgtagaactatccattggaaatggattagaaactcaaaacaataaactatgtgccaaattgggaaatgggttaaaatttaacaacggtgacatttgtataaaggatagtattaacaccttatggactggaataaaccctccacctaactgtcaaattgtggaaaacactaatacaaatgatggcaaacttactttagtattagtaaaaaatggagggcttgttaatggctacgtgtctctagttggtgtatcagacactgtgaaccaaatgttcacacaaaagacagcaaacatccaattaagattatattttgactcttctggaaatctattaactgaggaatcagacttaaaaattccacttaaaaataaatcttctacagcgaccagtgaaactgtagccagcagcaaagcctttatgccaagtactacagcttatcccttcaacaccactactagggatagtgaaaactacattcatggaatatgttactacatgactagttatgatagaagtctatttcccttgaacatttctataatgctaaacagccgtatgatttcttccaatgttgcctatgccatacaatttgaatggaatctaaatgcaagtgaatctccagaaagcaacatagctacgctgaccacatccccctttttcttttcttacattacagaagacgacaactaaaataaagtttaagtgtttttatttaaaatcacaaaattcgagtagttattttgcctccaccttcccatttgacagaatacacagtcctttctccccggctggccttaaaaagcatcatatcatgggtaacagacatattcttaggtgttatattccacacggtttcctgtcgagccaaacgctcatcagtgatattaataaactccccgggcagctcacttaagttcatgtcgctgtccagctgctgagccacaggctgctgtccaacttgcggttgcttaacgggcggcgaaggagaagtccacgcctacatgggggtagagtcataatcgtgcatcaggatagggcggtggtgctgcagcagcgcgcgaataaactgctgccgccgccgctccgtcctgcaggaatacaacatggcagtggtctcctcagcgatgattcgcaccgcccgcagcataaggcgccttgtcctccgggcacagcagcgcaccctgatctcacttaaatcagcacagtaactgcagcacagcaccacaatattgttcaaaatcccacagtgcaaggcgctgtatccaaagctcatggcggggaccacagaacccacgtggccatcataccacaagcgcaggtagattaagtggcgacccctcataaacacgctggacataaacattacctcttttggcatgttgtaattcaccacctcccggtaccatataaacctctgattaaacatggcgccatccaccaccatcctaaaccagctggccaaaacctgcccgccggctatacactgcagggaaccgggactggaacaatgacagtggagagcccaggactcgtaaccatggatcatcatgctcgtcatgatgtcaatgttggcacaacacaggcacacgtgcatacacttcctcaggattacaagctcctcccgcgttagaaccatatcccagggaacaacccattcctgaatcagcgtaaatcccacactgcagggaagacctcgcacgtaactcacgttgtgcattgtcaaagtgttacattcgggcagcagcggatgatcctccagtatggtagcgcgggtttctgtctcaaaaggaggtagacgatccctactgtacggagtgcgccgagacaaccgagatcgtgttggtcgtagtgtcatgccaaatggaacgccggacgtagtcattctcgtattttgtatagcaaaacgcggccctggcagaacacactcttcttcgccttctatcctgccgcttagcgtgttccgtgtgatagttcaagtacagccacactcttaagttggtcaaaagaatgctggcttcagttgtaatcaaaactccatcgcatctaattgttctgaggaaatcatccacggtagcatatgcaaatcccaaccaagcaatgcaactggattgcgtttcaagcaggagaggagagggaagagacggaagaaccatgttaatttttattccaaacgatctcgcagtacttcaaattgtagatcgcgcagatggcatctctcgcccccactgtgttggtgaaaaagcacagctaaatcaaaagaaatgcgattttcaaggtgctcaacggtggcttccaacaaagcctccacgcgcacatccaagaacaaaagaataccaaaagaaggagcattttctaactcctcaatcatcatattacattcctgcaccattcccagataattttcagctttccagccttgaattattcgtgtcagttcttgtggtaaatccaatccacacattacaaacaggtcccggagggcgccctccaccaccattcttaaacacaccctcataatgacaaaatatcttgctcctgtgtcacctgtagcgaattgagaatggcaacatcaattgacatgcccttggctctaagttcttctttaagttctagttgtaaaaactctctcatattatcaccaaactgcttagccagaagccccccgggaacaagagcaggggacgctacagtgcagtacaagcgcagacctccccaattggctccagcaaaaacaagattggaataagcatattgggaaccaccagtaatatcatcgaagttgctggaaatataatcaggcagagtttcttgtagaaattgaataaaagaaaaatttgccaaaaaaacattcaaaacctctgggatgcaaatgcaataggttaccgcgctgcgctccaacattgttagttttgaattagtctgcaaaaataaaaaaaaaacaagcgtcatatcatagtagcctgacgaacaggtggataaatcagtctttccatcacaagacaagccacagggtctccagctcgaccctcgtaaaacctgtcatcgtgattaaacaacagcaccgaaagttcctcgcggtgaccagcatgaataagtcttgatgaagcatacaatccagacatgttagcatcagttaaggagaaaaaacagccaacatagcctttgggtataattatgcttaatcgtaagtatagcaaagccacccctcgcggatacaaagtaaaaggcacaggagaataaaaaatataattatttctctgctgctgtttaggcaacgtcgcccccggtccctctaaatacacatacaaagcctcatcagccatggcttaccagagaaagtacagcgggcacacaaaccacaagctctaaagtcactctccaacctctccacaatatatatacacaagccctaaactgacgtaatgggactaaagtgtaaaaaatcccgccaaacccaacacacaccccgaaactgcgtcaccagggaaaagtacagtttcacttccgcaatcccaacaagcgtcacttcctctttctcacggtacgtcacatcccattaacttacaacgtcattttcccacggccgcgccgccccttttaaccgttaaccccacagccaatcaccacacggcccacactttttaaaatcacctcatttacatattggcaccattccatctataaggtatattattgatgatgtt

SEQ ID NO: 53 - DNA, 36265 bp, Artificial Sequence
  pAd35GFP-5E4-CCDb
catcatcaataatataccttatagatggaatggtgccaatatgtaaatgaggtgattttaaaaagtgtgggccgtgtggtgattggctgtggggttaacggttaaaaggggcggcgcggccgtgggaaaatgacgttttatgggggtggagtttttttgcaagttgtcgcgggaaatgttacgcataaaaaggcttcttttctcacggaactacttagttttcccacggtatttaacaggaaatgaggtagttttgaccggatgcaagtgaaaattgctgattttcgcgcgaaaactgaatgaggaagtgtttttctgaataatgtggtatttatggcagggtggagtatttgttcagggccaggtagactttgacccattacgtggaggtttcgattaccgtgttttttacctgaatttccgcgtaccgtgtcaaagtcttctgtttttacgtaggtgtcagctgatcgctagggtatttgttcaaaaaaaagcccgctcattaggcgggctgggttatattccccagaacatcaggttaatggcgtttttgatgtcattttcgcggtggctgagatcagccacttcttccccgataacggagaccggcacactggccatatcggtggtcatcatgcgccagctttcatccccgatatgcaccaccgggtaaagttcacgggagactttatctgacagcagacgtgcactggccagggggatcaccatccgtcgcccgggcgtgtcaataatatcactctgtacatccacaaacagacgataacggctctctcttttataggtgtaaaccttaaactgcataatctgacctcctggttatgtgtgggagggctaaccatggatccatggttaccaatgcttaatcagtgaggcacctatctcagcgatctgtctatttcgttcatccatagttgcctgactccccgtcgtgtagataactacgatacgggagggcttaccatctggccccagtgctgcaatgataccgcgagacccacgctcaccggctccagatttatcagcaataaaccagccagccggaagggccgagcgcagaagtggtcctgcaactttatccgcctccatccagtctattaattgttgccgggaagctagagtaagtagttcgccagttaatagtttgcgcaacgttgttgccattgctgcaggcatcgtggtgtcacgctcgtcgtttggtatggcttcattcagctccggttcccaacgatcaaggcgagttacatgatcccccatgttgtgcaaaaaagcggttagctccttcggtcctccgatcgttgtcagaagtaagttggccgcagtgttatcactcatggttatggcagcactgcataattctcttactgtcatgccatccgtaagatgcttttctgtgactggtgagtactcaaccaagtcattctgagaatagtgtatgcggcgaccgagttgctcttgcccggcgtcaacacgggataataccgcgccacatagcagaactttaaaagtgctcatcattggaaaacgttcttcggggcgaaaactctcaaggatcttaccgctgttgagatccagttcgatgtaacccactcgtgcacccaactgatcttcagcatcttttactttcaccagcgtttctgggtgagcaaaaacaggaaggcaaaatgccgcaaaaaagggaataagggcgacacggaaatgttgaatactcatactcttcctttttcaatattattgaagcatttatcagggttattgtctcatgagcggatacatatttgaatgtatttagaaaaataaacaaagctaccttaagagagtgtcaggaatgtttatgccttaccagtgtaacatgaatcatgtgaaagtgttgttggaaccagatgccttttccagaatgagcctaacaggaatctttgacatgaacacgcaaatctggaagatcctgaggtatgatgatacgagatcgagggtgcgcgcatgcgaatgcggaggcaagcatgccaggttccagccggtgtgtgtagatgtgaccgaagatctcagaccggatcatttggttattgcccgcactggagcagagttcggatccagtggagaagaaactgactaaggtgagtattgggaaaactttggggtgggattttcagatggacagattgagtaaaaatttgttttttctgtcttgcagctgacatgagtggaaatgcttcttttaaggggggagtcttcagcccttatctgacagggcgtctcccatcctgggcaggagttcgtcagaatgttatgggatctactgtggatggaagacccgttcaacccgccaattcttcaacgctgacctatgctactttaagttcttcacctttggacgcagctgcagccgctgccgccgcctctgtcgccgctaacactgtgcttggaatgggttactatggaagcatcgtggctaattccacttcctctaataacccttctacactgactcaggacaagttacttgtccttttggcccagctggaggctttgacccaacgtctgggtgaactttctcagcaggtggccgagttgcgagtacaaactgagtctgctgtcggcacggcaaagtctaaataaaaaaaattccagaatcaatgaataaataaacgagcttgttgttgatttaaaatcaagtgtttttatttcatttttcgcgcacggtatgccctggaccaccgatctcgatcattgagaactcggtggattttttccagaatcctatagaggtgggattgaatgtttagatacatgggcattaggccgtctttggggtggagatagctccattgaagggattcatgctccggggtagtgttgtaaatcacccagtcataacaaggtcgcagtgcatggtgttgcacaatatcttttagaagtaggctgattgccacagataagcccttggtgtaggtgtttacaaaccggttgagctgggaggggtgcattcgaggtgaaattatgtgcattttggattggatttttaagttggcaatattgccgccaagatcccgtcttgggttcatgttatgaaggactaccaagacggtgtatccggtacatttaggaaatttatcgtgcagcttggatggaaaagcgtggaaaaatttggagacacccttgtgtcctccgagattttccatgcactcatccatgataatagcaatggggccgtgggcagcggcgcgggcaaacacgttccgtgggtctgacacatcatagttatgttcctgagttaaatcatcataagccattttaatgaatttggggcggagcgtaccagattggggtatgaatgttccttcgggccccggagcatagttcccctcacagatttgcatttcccaagctttcagttctgagggtggaatcatgtccacctggggggctatgaagaacaccgtttcgggggcgggggtgattagttgggatgatagcaagtttctgagcaattgagatttgccacatccggtggggccataaataattccgattacaggttgcaggtggtagtttagggaacggcaactgccgtcttctcgaagcaagggggccacctcgttcatcatttcccttacatgcatattttcccgcaccaaatccattaggaggcgctctcctcctagtgatagaagttcttgtagtgaggaaaagtttttcagcggttttagaccgtcagccatgggcattttggaaagagtttgctgcaaaagttctagtctgttccacagttcagtgatgtgttctatggcatctcgatccagcagacctcctcgtttcgcgggtttggacggctcctggagtagggtatgagacgatgggcgtccagcgctgccagggttcggtccttccagggtctcagtgttcgagtcagggttgtttccgtcacagtgaaggggtgtgcgcctgcttgggcgcttgccagggtgcgcttcagactcattctgctggtggagaacttctgtcgcttggcgccctgtatgtcggccaagtagcagtttaccatgagttcgtagttgagcgcctcggctgcgtggcctttggcgcggagcttacctttggaagttttcttgcataccgggcagtataggcatttcagcgcatacagcttgggcgcaaggaaaatggattctggggagtatgcatccgcgccgcaggaggcgcaaacagtttcacattccaccagccaggttaaatccggttcattggggtcaaaaacaagttttccgccatattttttgatgcgtttcttacctttggtctccataagttcgtgtcctcgttgagtgacaaacaggctgtccgtatctccgtagactgattttacaggcctcttctccagtggagtgcctcggtcttcttcgtacaggaactctgaccactctgatacaaaggcgcgcgtccaggccagcacaaaggaggctatgtgggaggggtagcgatcgttgtcaaccagggggtccaccttttccaaagtatgcaaacacatgtcaccctcttcaacatccaggaatgtgattggcttgtaggtgtatttcacgtgacctggggtccccgctgggggggtataaaagggggcggttctttgctcttcctcactgtcttccggatcgctgtccaggaacgtcagctgttggggtaggtattccctctcgaaggcgggcatgacctctgcactcaggttgtcagtttctaagaacgaggaggatttgatattgacagtgccggttgagatgcctttcatgaggttttcgtccatttggtcagaaaacacaatttttttattgtcaagtttggtggcaaatgatccatacagggcgttggataaaagtttggcaatggatcgcatggtttggttcttttccttgtccgcgcgctctttggcggcgatgttgagttggacatactcgcgtgccaggcacttccattcggggaagatagttgttaattcatctggcacgattctcacttgccaccctcgattatgcaaggtaattaaatccacactggtggccacctcgcctcgaaggggttcattggtccaacagagcctacctcctttcctagaacagaaagggggaagtgggtctagcataagttcatcgggagggtctgcatccatggtaaagattcccggaagtaaatccttatcaaaatagctgatgggagtggggtcatctaaggccatttgccattctcgagctgccagtgcgcgctcatatgggttaaggggactgccccagggcatgggatgggtgagagcagaggcatacatgccacagatgtcatagacgtagatgggatcctcaaagatgcctatgtaggttggatagcatcgcccccctctgatacttgctcgcacatagtcatatagttcatgtgatggcgctagcagccccggacccaagttggtgcgattgggtttttctgttctgtagacgatctggcgaaagatggcgtgagaattggaagagatggtgggtctttgaaaaatgttgaaatgggcatgaggtagacctacagagtctctgacaaagtgggcataagattcttgaagcttggttaccagttcggcggtgacaagtacgtctagggcgcagtagtcaagtgtttcttgaatgatgtcataacctggttggtttttcttttcccacagttcgcggttgagaaggtattcttcgcgatccttccagtactcttctagcggaaacccgtctttgtctgcacggtaagatcctagcatgtagaactgattaactgccttgtaagggcagcagcccttctctacgggtagagagtatgcttgagcagcttttcgtagcgaagcgtgagtaagggcaaaggtgtctctgaccatgactttgagaaattggtatttgaagtccatgtcgtcacaggctccctgttcccagagttggaagtctacccgtttcttgtaggcggggttgggcaaagcgaaagtaacatcattgaagagaatcttaccggctctgggcataaaattgcgagtgatgcggaaaggctgtggtacttccgctcgattgttgatcacctgggcagctaggacgatttcgtcgaaaccgttgatgttgtgtcctacgatgtataattctatgaaacgcggcgtgcctctgacgtgaggtagcttactgagctcatcaaaggttaggtctgtggggtcagataaggcgtagtgttcgagagcccattcgtgcaggtgaggatttgcatgtaggaatgatgaccaaagatctaccgccagtgctgtttgtaactggtcccgatactgacgaaaatgccggccaattgccattttttctggagtgacacagtagaaggttctggggtcttgttgccatcgatcccacttgagtttaatggctagatcgtgggccatgttgacgagacgctcttctcctgagagtttcatgaccagcatgaaaggaactagttgtttgccaaaggatcccatccaggtgtaagtttccacatcgtaggtcaggaagagtctttctgtgcgaggatgagagccgatcgggaagaactggatttcctgccaccagttggaggattggctgttgatgtgatggaagtagaagtttctgcggcgcgccgagcattcgtgtttgtgcttgtacagacggccgcagtagtcgcagcgttgcacgggttgtatctcgtgaatgagctgtacctggcttcccttgacgagaaatttcagtgggaagccgaggcctggcgattgtatctcgtgctcttctatattcgctgtatcggcctgttcatcttctgtttcgatggtggtcatgctgacgagcccccgcgggaggcaagtccagacctcggcgcgggaggggcggagctgaaggacgagagcgcgcaggctggagctgtccagagtcctgagacgctgcggactcaggttagtaggtagggacagaagattaacttgcatgatcttttccagggcgtgcgggaggttcagatggtacttgatttccacaggttcgtttgtagagacgtcaatggcttgcagggttccgtgtcctttgggcgccactaccgtacctttgttttttcttttgatcggtggtggctctcttgcttcttgcatgctcagaagcggtgacggggacgcgcgccgggcggcagcggttgttccggacccgggggcatggctggtagtggcacgtcggcgccgcgcacgggcaggttctggtattgcgctctgagaagacttgcgtgcgccaccacgcgtcgattgacgtcttgtatctgacgtctctgggtgaaagctaccggccccgtgagcttgaacctgaaagagagttcaacagaatcaatttcggtatcgttaacggcagcttgtctcagtatttcttgtacgtcaccagagttgtcctggtaggcgatctccgccatgaactgctcgatttcttcctcctgaagatctccgcgacccgctctttcgacggtggccgcgaggtcattggagatacggcccatgagttgggagaatgcattcatgcccgcctcgttccagacgcggctgtaaaccacggccccctcggagtctcttgcgcgcatcaccacctgagcgaggttaagctccacgtgtctggtgaagaccgcatagttgcataggcgctgaaaaaggtagttgagtgtggtggcaatgtgttcggcgacgaagaaatacatgatccatcgtctcagcggcatttcgctaacatcgcccagagcttccaagcgctccatggcctcgtagaagtccacggcaaaattaaaaaactgggagtttcgcgcggacacggtcaattcctcctcgagaagacggatgagttcggctatggtggcccgtacttcgcgttcgaaggctcccgggatctcttcttcctcttctatctcttcttccactaacatctcttcttcgtcttcaggcgggggcggagggggcacgcggcgacgtcgacggcgcacgggcaaacggtcgatgaatcgttcaatgacctctccgcggcggcggcgcatggtttcagtgacggcgcggccgttctcgcgcggtcgcagagtaaaaacaccgccgcgcatctccttaaagtggtgactgggaggttctccgtttgggagggagagggcgctgattatacattttattaattggcccgtagggactgcgcgcagagatctgatcgtgtcaagatccacgggatctgaaaacctttcgacgaaagcgtctaaccagtcacagtcacaaggtaggctgagtacggcttcttgtgggcgggggtggttatgtgttcggtctgggtcttctgtttcttcttcatctcgggaaggtgagacgatgctgctggtgatgaaattaaagtaggcagttctaagacggcggatggtggcgaggagcaccaggtctttgggtccggcttgctggatacgcaggcgattggccattccccaagcattatcctgacatctagcaagatctttgtagtagtcttgcatgagccgttctacgggcacttcttcctcacccgttctgccatgcatacgtgtgagtccaaatccgcgcattggttgtaccagtgccaagtcagctacgactctttcggcgaggatggcttgctgtacttgggtaagggtggcttgaaagtcatcaaaatccacaaagcggtggtaagcccctgtattaatggtgtaagcacagttggccatgactgaccagttaactgtctggtgaccagggcgcacgagctcggtgtatttaaggcgcgaataggcgcgggtgtcaaagatgtaatcgttgcaggtgcgcaccagatactggtaccctataagaaaatgcggcggtggttggcggtagagaggccatcgttctgtagctggagcgccaggggcgaggtcttccaacataaggcggtgatagccgtagatgtacctggacatccaggtgattcctgcggcggtagtagaagcccgaggaaactcgcgtacgcggttccaaatgttgcgtagcggcatgaagtagttcattgtaggcacggtttgaccagtgaggcgcgcgcagtcattgatgctctatagacacggagaaaatgaaagcgttcagcgactcgactccgtagcctggaggaacgtgaacgggttgggtcgcggtgtaccccggttcgagacttgtactcgagccggccggagccgcggctaacgtggtattggcactcccgtctcgacccagcctacaaaaatccaggatacggaatcgagtcgttttgctggtttccgaatggcagggaagtgagtcctattttttttttttttgccgctcagatgcatcccgtgctgcgacagatgcgcccccaacaacagcccccctcgcagcagcagcagcagcaaccacaaaaggctgtccctgcaactactgcaactgccgccgtgagcggtgcgggacagcccgcctatgatctggacttggaagagggcgaaggactggcacgtctaggtgcgccttcgcccgagcggcatccgcgagttcaactgaaaaaagattctcgcgaggcgtatgtgccccaacagaacctatttagagacagaagcggcgaggagccggaggagatgcgagcttcccgctttaacgcgggtcgtgagctgcgtcacggtttggaccgaagacgagtgttgcgagacgaggatttcgaagttgatgaagtgacagggatcagtcctgccagggcacacgtggctgcagccaaccttgtatcggcttacgagcagacagtaaaggaagagcgtaacttccaaaagtcttttaataatcatgtgcgaaccctgattgcccgcgaagaagttacccttggtttgatgcatttgtgggatttgatggaagctatcattcagaaccctactagcaaacctctgaccgcccagctgtttctggtggtgcaacacagcagagacaatgaggctttcagagaggcgctgctgaacatcaccgaacccgaggggagatggttgtatgatcttatcaacattctacagagtatcatagtgcaggagcggagcctgggcctggccgagaaggtagctgccatcaattactcggttttgagcttgggaaaatattacgctcgcaaaatctacaagactccatacgttcccatagacaaggaggtgaagatagatgggttctacatgcgcatgacgctcaaggtcttgaccctgagcgatgatcttggggtgtatcgcaatgacagaatgcatcgcgcggttagcgccagcaggaggcgcgagttaagcgacagggaactgatgcacagtttgcaaagagctctgactggagctggaaccgagggtgagaattacttcgacatgggagctgacttgcagtggcagcctagtcgcagggctctgagcgccgcgacggcaggatgtgagcttccttacatagaagaggcggatgaaggcgaggaggaagagggcgagtacttggaagactgatggcacaacccgtgttttttgctagatggaacagcaagcaccggatcccgcaatgcgggcggcgctgcagagccagccgtccggcattaactcctcggacgattggacccaggccatgcaacgtatcatggcgttgacgactcgcaaccccgaagcctttagacagcaaccccaggccaaccgtctatcggccatcatggaagctgtagtgccttcccgatctaatcccactcatgagaaggtcctggccatcgtgaacgcgttggtggagaacaaagctattcgtccagatgaggccggactggtatacaacgctctcttagaacgcgtggctcgctacaacagtagcaatgtgcaaaccaatttggaccgtatgataacagatgtacgcgaagccgtgtctcagcgcgaaaggttccagcgtgatgccaacctgggttcgctggtggcgttaaatgctttcttgagtactcagcctgctaatgtgccgcgtggtcaacaggattatactaactttttaagtgctttgagactgatggtatcagaagtacctcagagcgaagtgtatcagtccggtcctgattacttctttcagactagcagacagggcttgcagacggtaaatctgagccaagcttttaaaaaccttaaaggtttgtggggagtgcatgccccggtaggagaaagagcaaccgtgtctagcttgttaactccgaactcccgcctgttattactgttggtagctcctttcaccgacagcggtagcatcgaccgtaattcctatttgggttacctactaaacctgtatcgcgaagccatagggcaaagtcaggtggacgagcagacctatcaagaaattacccaagtcagtcgcgctttgggacaggaagacactggcagtttggaagccactctgaacttcttgcttaccaatcggtctcaaaagatccctcctcaatatgctcttactgcggaggaggagaggatccttagatatgtgcagcagagcgtgggattgtttctgatgcaagagggggcaactccgactgcagcactggacatgacagcgcgaaatatggagcccagcatgtatgccagtaaccgacctttcattaacaaactgctggactacttgcacagagctgccgctatgaactctgattatttcaccaatgccatcttaaacccgcactggctgcccccacctggtttctacacgggcgaatatgacatgcccgaccctaatgacggatttctgtgggacgacgtggacagcgatgttttttcacctctttctgatcatcgcacgtggaaaaaggaaggcggtgatagaatgcattcttctgcatcgctgtccggggtcatgggtgctaccgcggctgagcccgagtctgcaagtccttttcctagtctacccttttctctacacagtgtacgtagcagcgaagtgggtagaataagtcgcccgagtttaatgggcgaagaggagtacctaaacgattccttgctcagaccggcaagagaaaaaaatttcccaaacaatggaatagaaagtttggtggataaaatgagtagatggaagacttatgctcaggatcacagagacgagcctgggatcatggggactacaagtagagcgagccgtagacgccagcgccatgacagacagaggggtcttgtgtgggacgatgaggattcggccgatgatagcagcgtgttggacttgggtgggagaggaaggggcaacccgtttgctcatttgcgccctcgcttgggtggtatgttgtgaaaaaaaataaaaaagaaaaactcaccaaggccatggcgacgagcgtacgttcgttcttctttattatctgtgtctagtataatgaggcgagtcgtgctaggcggagcggtggtgtatccggagggtcctcctccttcgtacgagagcgtgatgcagcagcagcaggcgacggcggtgatgcaatccccactggaggctccctttgtgcctccgcgatacctggcacctacggagggcagaaacagcattcgttactcggaactggcacctcagtacgataccaccaggttgtatctggtggacaacaagtcggcggacattgcttctctgaactatcagaatgaccacagcaacttcttgaccacggtggtgcagaacaatgactttacccctacggaagccagcacccagaccattaactttgatgaacgatcgcggtggggcggtcagctaaagaccatcatgcatactaacatgccaaacgtgaacgagtatatgtttagtaacaagttcaaagcgcgtgtgatggtgtccagaaaacctcccgacggtgctgcagttggggatacttatgatcacaagcaggatattttggaatatgagtggttcgagtttactttgccagaaggcaacttttcagttactatgactattgatttgatgaacaatgccatcatagataattacttgaaagtgggtagacagaatggagtgcttgaaagtgacattggtgttaagttcgacaccaggaacttcaagctgggatgggatcccgaaaccaagttgatcatgcctggagtgtatacgtatgaagccttccatcctgacattgtcttactgcctggctgcggagtggattttaccgagagtcgtttgagcaaccttcttggtatcagaaaaaaacagccatttcaagagggttttaagattttgtatgaagatttagaaggtggtaatattccggccctcttggatgtagatgcctatgagaacagtaagaaagaacaaaaagccaaaatagaagctgctacagctgctgcagaagctaaggcaaacatagttgccagcgactctacaagggttgctaacgctggagaggtcagaggagacaattttgcgccaacacctgttccgactgcagaatcattattggccgatgtgtctgaaggaacggacgtgaaactcactattcaacctgtagaaaaagatagtaagaatagaagctataatgtgttggaagacaaaatcaacacagcctatcgcagttggtatctttcgtacaattatggcgatcccgaaaaaggagtgcgttcctggacattgctcaccacctcagatgtcacctgcggagcagagcaggtttactggtcgcttccagacatgatgaaggatcctgtcactttccgctccactagacaagtcagtaactaccctgtggtgggtgcagagcttatgcccgtcttctcaaagagcttctacaacgaacaagctgtgtactcccagcagctccgccagtccacctcgcttacgcacgtcttcaaccgctttcctgagaaccagattttaatccgtccgccggcgcccaccattaccaccgtcagtgaaaacgttcctgctctcacagatcacgggaccctgccgttgcgcagcagtatccggggagtccaacgtgtgaccgttactgacgccagacgccgcacctgtccctacgtgtacaaggcactgggcatagtcgcaccgcgcgtcctttcaagccgcactttctaaaaaaaaaatgtccattcttatctcgcccagtaataacaccggttggggtctgcgcgctccaagcaagatgtacggaggcgcacgcaaacgttctacccaacatcccgtgcgtgttcgcggacattttcgcgctccatggggtgccctcaagggccgcactcgcgttcgaaccaccgtcgatgatgtaatcgatcaggtggttgccgacgcccgtaattatactcctactgcgcctacatctactgtggatgcagttattgacagtgtagtggctgacgctcgcaactatgctcgacgtaagagccggcgaaggcgcattgccagacgccaccgagctaccactgccatgcgagccgcaagagctctgctacgaagagctagacgcgtggggcgaagagccatgcttagggcggccagacgtgcagcttcgggcgccagcgccggcaggtcccgcaggcaagcagccgctgtcgcagcggcgactattgccgacatggcccaatcgcgaagaggcaatgtatactgggtgcgtgacgctgccaccggtcaacgtgtacccgtgcgcacccgtccccctcgcacttagaagatactgagcagtctccgatgttgtgtcccagcggcgaggatgtccaagcgcaaatacaaggaagaaatgctgcaggttatcgcacctgaagtctacggccaaccgttgaaggatgaaaaaaaaccccgcaaaatcaagcgggttaaaaaggacaaaaaagaagaggaagatggcgatgatgggctggcggagtttgtgcgcgagtttgccccacggcgacgcgtgcaatggcgtgggcgcaaagttcgacatgtgttgagacctggaacttcggtggtctttacacccggcgagcgttcaagcgctacttttaagcgttcctatgatgaggtgtacggggatgatgatattcttgagcaggcggctgaccgattaggcgagtttgcttatggcaagcgtagtagaataacttccaaggatgagacagtgtcaatacccttggatcatggaaatcccacccctagtcttaaaccggtcactttgcagcaagtgttacccgtaactccgcgaacaggtgttaaacgcgaaggtgaagatttgtatcccactatgcaactgatggtacccaaacgccagaagttggaggacgttttggagaaagtaaaagtggatccagatattcaacctgaggttaaagtgagacccattaagcaggtagcgcctggtctgggggtacaaactgtagacattaagattcccactgaaagtatggaagtgcaaactgaacccgcaaagcctactgccacctccactgaagtgcaaacggatccatggatgcccatgcctattacaactgacgccgccggtcccactcgaagatcccgacgaaagtacggtccagcaagtctgttgatgcccaattatgttgtacacccatctattattcctactcctggttaccgaggcactcgctactatcgcagccgaaacagtacctcccgccgtcgccgcaagacacctgcaaatcgcagtcgtcgccgtagacgcacaagcaaaccgactcccggcgccctggtgcggcaagtgtaccgcaatggtagtgcggaacctttgacactgccgcgtgcgcgttaccatccgagtatcatcacttaatcaatgttgccgctgcctccttgcagatatggccctcacttgtcgccttcgcgttcccatcactggttaccgaggaagaaactcgcgccgtagaagagggatgttgggacgcggaatgcgacgctacaggcgacggcgtgctatccgcaagcaattgcggggtggttttttaccagccttaattccaattatcgctgctgcaattggcgcgataccaggcatagcttccgtggcggttcaggcctcgcaacgacattgacattggaaaaaaaacgtataaataaaaaaaaatacaatggactctgacactcctggtcctgtgactatgttttcttagagatggaagacatcaatttttcatccttggctccgcgacacggcacgaagccgtacatgggcacctggagcgacatcggcacgagccaactgaacgggggcgccttcaattggagcagtatctggagcgggcttaaaaattttggctcaaccataaaaacatacgggaacaaagcttggaacagcagtacaggacaggcgcttagaaataaacttaaagaccagaacttccaacaaaaagtagtcgatgggatagcttccggcatcaatggagtggtagatttggctaaccaggctgtgcagaaaaagataaacagtcgtttggacccgccgccagcaaccccaggtgaaatgcaagtggaggaagaaattcctccgccagaaaaacgaggcgacaagcgtccgcgtcccgatttggaagagacgctggtgacgcgcgtagatgaaccgccttcttatgaggaagcaacgaagcttggaatgcccaccactagaccgatagccccaatggccaccggggtgatgaaaccttctcagttgcatcgacccgtcaccttggatttgccccctccccctgctgctactgctgtacccgcttctaagcctgtcgctgccccgaaaccagtcgccgtagccaggtcacgtcccgggggcgctcctcgtccaaatgcgcactggcaaaatactctgaacagcatcgtgggtctaggcgtgcaaagtgtaaaacgccgtcgctgcttttaattaaatatggagtagcgcttaacttgcctatctgtgtatatgtgtcattacacgccgtcacagcagcagaggaaaaaaggaagaggtcgtgcgtcgacgctgagttactttcaagatggccaccccatcgatgctgccccaatgggcatacatgcacatcgccggacaggatgcttcggagtacctgagtccgggtctggtgcagttcgcccgcgccacagacacctacttcaatctgggaaataagtttagaaatcccaccgtagcgccgacccacgatgtgaccaccgaccgtagccagcggctcatgttgcgcttcgtgcccgttgaccgggaggacaatacatactcttacaaagtgcggtacaccctggccgtgggcgacaacagagtgctggatatggccagcacgttctttgacattaggggcgtgttggacagaggtcccagtttcaaaccctattctggtacggcttacaactctctggctcctaaaggcgctccaaatgcatctcaatggattgcaaaaggcgtaccaactgcagcagccgcaggcaatggtgaagaagaacatgaaacagaggagaaaactgctacttacacttttgccaatgctcctgtaaaagccgaggctcaaattacaaaagagggcttaccaataggtttggagatttcagctgaaaacgaatctaaacccatctatgcagataaactttatcagccagaacctcaagtgggagatgaaacttggactgacctagacggaaaaaccgaagagtatggaggcagggctctaaagcctactactaacatgaaaccctgttacgggtcctatgcgaagcctactaatttaaaaggtggtcaggcaaaaccgaaaaactcggaaccgtcgagtgaaaaaattgaatatgatattgacatggaattttttgataactcatcgcaaagaacaaacttcagtcctaaaattgtcatgtatgcagaaaatgtaggtttggaaacgccagacactcatgtagtgtacaaacctggaacagaagacacaagttccgaagctaatttgggacaacagtctatgcccaacagacccaactacattggcttcagagataactttattggactcatgtactataacagtactggtaacatgggggtgctggctggtcaagcgtctcagttaaatgcagtggttgacttgcaggacagaaacacagaactttcttaccaactcttgcttgactctctgggcgacagaaccagatactttagcatgtggaatcaggctgtggacagttatgatcctgatgtacgtgttattgaaaatcatggtgtggaagatgaacttcccaactattgttttccactggacggcataggtgttccaacaaccagttacaaatcaatagttccaaatggagaagataataataattggaaagaacctgaagtaaatggaacaagtgagatcggacagggtaatttgtttgccatggaaattaaccttcaagccaatctatggcgaagtttcctttattccaatgtggctctgtatctcccagactcgtacaaatacaccccgtccaatgtcactcttccagaaaacaaaaacacctacgactacatgaacgggcgggtggtgccgccatctctagtagacacctatgtgaacattggtgccaggtggtctctggatgccatggacaatgtcaacccattcaaccaccaccgtaacgctggcttgcgttaccgatctatgcttctgggtaacggacgttatgtgcctttccacatacaagtgcctcaaaaattcttcgctgttaaaaacctgctgcttctcccaggctcctacacttatgagtggaactttaggaaggatgtgaacatggttctacagagttccctcggtaacgacctgcgggtagatggcgccagcatcagtttcacgagcatcaacctctatgctacttttttccccatggctcacaacaccgcttccacccttgaagccatgctgcggaatgacaccaatgatcagtcattcaacgactacctatctgcagctaacatgctctaccccattcctgccaatgcaaccaatattcccatttccattccttctcgcaactgggcggctttcagaggctggtcatttaccagactgaaaaccaaagaaactccctctttggggtctggatttgacccctactttgtctattctggttctattccctacctggatggtaccttctacctgaaccacacttttaagaaggtttccatcatgtttgactcttcagtgagctggcctggaaatgacaggttactatctcctaacgaatttgaaataaagcgcactgtggatggcgaaggctacaacgtagcccaatgcaacatgaccaaagactggttcttggtacagatgctcgccaactacaacatcggctatcagggcttctacattccagaaggatacaaagatcgcatgtattcatttttcagaaacttccagcccatgagcaggcaggtggttgatgaggtcaattacaaagacttcaaggccgtcgccataccctaccaacacaacaactctggctttgtgggttacatggctccgaccatgcgccaaggtcaaccctatcccgctaactatccctatccactcattggaacaactgccgtaaatagtgttacgcagaaaaagttcttgtgtgacagaaccatgtggcgcataccgttctcgagcaacttcatgtctatgggggcccttacagacttgggacagaatatgctctatgccaactcagctcatgctctggacatgacctttgaggtggatcccatggatgagcccaccctgctttatcttctcttcgaagttttcgacgtggtcagagtgcatcagccacaccgcggcatcatcgaggcagtctacctgcgtacaccgttctcggccggtaacgctaccacgtaagaagcttcttgcttcttgcaaatagcagctgcaaccatggcctgcggatcccaaaacggctccagcgagcaagagctcagagccattgtccaagacctgggttgcggaccctattttttgggaacctacgataagcgcttcccggggttcatggcccccgataagctcgcctgtgccattgtaaatacggccggacgtgagacggggggagagcactggttggctttcggttggaacccacgttctaacacctgctacctttttgatccttttggattctcggatgatcgtctcaaacagatttaccagtttgaatatgagggtctcctgcgccgcagcgctcttgctaccaaggaccgctgtattacgctggaaaaatctacccagaccgtgcagggcccccgttctgccgcctgcggacttttctgctgcatgttccttcacgcctttgtgcactggcctgaccgtcccatggacggaaaccccaccatgaaattgctaactggagtgccaaacaacatgcttcattctcctaaagtccagcccaccctgtgtgacaatcaaaaagcactctaccattttcttaatacccattcgccttattttcgctctcatcgtacacacatcgaaagggccactgcgttcgaccgtatggatgttcaataatgactcatgtaaacaacgtgttcaataaacatcactttatttttttacatgtatcaaggctctggattacttatttatttacaagtcgaatgggttctgacgagaatcagaatgacccgcaggcagtgatacgttgcggaactgatacttgggttgccacttgaattcgggaatcaccaacttgggaaccggtatatcgggcaggatgtcactccacagctttctggtcagctgcaaagctccaagcaggtcaggagccgaaatcttgaaatcacaattaggaccagtgctctgagcgcgagagttgcggtacaccggattgcagcactgaaacaccatcagcgacggatgtctcacgcttgccagcacggtgggatctgcaatcatgcccacatccagatcttcagcattggcaatgctgaacggggtcatcttgcaggtctgcctacccatggcgggcacccaattaggcttgtggttgcaatcgcagtgcagggggatcagtatcatcttggcctgatcctgtctgattcctggatacacggctctcatgaaagcatcatattgcttgaaagcctgctgggctttactaccctcggtataaaacatcccgcaggacctgctcgaaaactggttagctgcacagccggcatcattcacacagcagcgggcgtcattgttggctatttgcaccacacttctgccccagcggttttgggtgattttggttcgctcgggattctcctttaaggctcgttgtccgttctcgctggccacatccatctcgataatctgctccttctgaatcataatattgccatgcaggcacttcagcttgccctcataatcattgcagccatgaggccacaacgcacagcctgtacattcccaattatggtgggcgatctgagaaaaagaatgtatcattccctgcagaaatcttcccatcatcgtgctcagtgtcttgtgactagtgaaagttaactggatgcctcggtgctcttcgtttacgtactggtgacagatgcgcttgtattgttcgtgttgctcaggcattagtttaaaacaggttctaagttcgttatccagcctgtacttctccatcagcagacacatcacttccatgcctttctcccaagcagacaccaggggcaagctaatcggattcttaacagtgcaggcagcagctcctttagccagagggtcatctttagcgatcttctcaatgcttcttttgccatccttctcaacgatgcgcacgggcgggtagctgaaacccactgctacaagttgcgcctcttctctttcttcttcgctgtcttgactgatgtcttgcatggggatatgtttggtcttccttggcttctttttggggggtatcggaggaggaggactgtcgctccgttccggagacagggaggattgtgacgtttcgctcaccattaccaactgactgtcggtagaagaacctgaccccacacggcgacaggtgtttttcttcgggggcagaggtggaggcgattgcgaagggctgcggtccgacctggaaggcggatgactggcagaaccccttccgcgttcgggggtgtgctccctgtggcggtcgcttaactgatttccttcgcggctggccattgtgttctcctaggcagagaaacaacagacatggaaactcagccattgctgtcaacatcgccacgagtgccatcacatctcgtcctcagcgacgaggaaaaggagcagagcttaagcattccaccgcccagtcctgccaccacctctaccctagaagataaggaggtcgacgcatctcatgacatgcagaataaaaaagcgaaagagtctgagacagacatcgagcaagacccgggctatgtgacaccggtggaacacgaggaagagttgaaacgctttctagagagagaggatgaaaactgcccaaaacagcgagcagataactatcaccaagatgctggaaatagggatcagaacaccgactacctcatagggcttgacggggaagacgcgctccttaaacatctagcaagacagtcgctcatagtcaaggatgcattattggacagaactgaagtgcccatcagtgtggaagagctcagctgcgcctacgagcttaaccttttttcacctcgtactccccccaaacgtcagccaaacggcacctgcgagccaaatcctcgcttaaacttttatccagcttttgctgtgccagaagtactggctacctatcacatcttttttaaaaatcaaaaaattccagtctcctgccgcgctaatcgcacccgcgccgatgccctactcaatctgggacctggttcacgcttacctgatatagcttccttggaagaggttccaaagatcttcgagggtctgggcaataatgagactcgggccgcaaatgctctgcaaaagggagaaaatggcatggatgagcatcacagcgttctggtggaattggaaggcgataatgccagactcgcagtactcaagcgaagcgtcgaggtcacacacttcgcatatcccgctgtcaacctgccccctaaagtcatgacggcggtcatggaccagttactcattaagcgcgcaagtcccctttcagaagacatgcatgacccagatgcctgtgatgagggtaaaccagtggtcagtgatgagcagctaacccgatggctgggcaccgactctccccgggatttggaagagcgtcgcaagcttatgatggccgtggtgctggttaccgtagaactagagtgtctccgacgtttctttaccgattcagaaaccttgcgcaaactcgaagagaatctgcactacacttttagacacggctttgtgcggcaggcatgcaagatatctaacgtggaactcaccaacctggtttcctacatgggtattctgcatgagaatcgcctaggacaaagcgtgctgcacagcacccttaagggggaagcccgccgtgattacatccgcgattgtgtctatctctacctgtgccacacgtggcaaaccggcatgggtgtatggcagcaatgtttagaagaacagaacttgaaagagcttgacaagctcttacagaaatctcttaaggttctgtggacagggttcgacgagcgcaccgtcgcttccgacctggcagacctcatcttcccagagcgtctcagggttactttgcgaaacggattgcctgactttatgagccagagcatgcttaacaattttcgctctttcatcctggaacgctccggtatcctgcccgccacctgctgcgcactgccctccgactttgtgcctctcacctaccgcgagtgccccccgccgctatggagtcactgctacctgttccgtctggccaactatctctcctaccactcggatgtgatcgaggatgtgagcggagacggcttgctggagtgccactgccgctgcaatctgtgcacgccccaccggtccctagcttgcaacccccagttgatgagcgaaacccagataataggcacctttgaattgcaaggccccagcagccaaggcgatgggtcttctcctgggcaaagtttaaaactgaccccgggactgtggacctccgcctacttgcgcaagtttgctccggaagattaccacccctatgaaatcaagttctatgaggaccaatcacagcctccaaaggccgaactttcggcttgcgtcatcacccagggggcaattctggcccaattgcaagccatccaaaaatcccgccaagaatttctactgaaaaagggtaagggggtctaccttgacccccagaccggcgaggaactcaacacaaggttccctcaggatgtcccaacgacgagaaaacaagaagttgaaggtgcagccgccgcccccagaagatatggaggaagattgggacagtcaggcagaggaggcggaggaggacagtctggaggacagtctggaggaagacagtttggaggaggaaaacgaggaggcagaggaggtggaagaagtaaccgccgacaaacagttatcctcggctgcggagacaagcaacagcgctaccatctccgctccgagtcgaggaacccggcggcgtcccagcagtagatgggacgagaccggacgcttcccgaacccaaccagcgcttccaagaccggtaagaaggatcggcagggatacaagtcctggcgggggcataagaatgccatcatctcctgcttgcatgagtgcgggggcaacatatccttcacgcggcgctacttgctattccaccatggggtgaactttccgcgcaatgttttgcattactaccgtcacctccacagcccctactatagccagcaaatcccgacagtctcgacagataaagacagcggcggcgacctccaacagaaaaccagcagcggcagttagaaaatacacaacaagtgcagcaacaggaggattaaagattacagccaacgagccagcgcaaacccgagagttaagaaatcggatctttccaaccctgtatgccatcttccagcagagtcggggtcaagagcaggaactgaaaataaaaaaccgatctctgcgttcgctcaccagaagttgtttgtatcacaagagcgaagatcaacttcagcgcactctcgaggacgccgaggctctcttcaacaagtactgcgcgctgactcttaaagagtaggcagcgaccgcgcttattcaaaaaaggcgggaattacatcatcctcgacatgagtaaagaaattcccacgccttacatgtggagttatcaaccccaaatgggattggcagcaggcgcctcccaggactactccacccgcatgaattggctcagcgccgggccttctatgatttctcgagttaatgatatacgcgcctaccgaaaccaaatacttttggaacagtcagctcttaccaccacgccccgccaacaccttaatcccagaaattggcccgccgccctagtgtaccaggaaagtcccgctcccaccactgtattacttcctcgagacgcccaggccgaagtccaaatgactaatgcaggtgcgcagttagctggcggctccaccctatgtcgtcacaggcctcggcataatataaaacgcctgatgatcagaggccgaggtatccagctcaacgacgagtcggtgagctctccgcttggtctacgaccagacggaatctttcagattgccggctgcgggagatcttccttcacccctcgtcaggctgttctgactttggaaagttcgtcttcgcaaccccgctcgggcggaatcgggaccgttcaatttgtagaggagtttactccctctgtctacttcaaccccttctccggatctcctgggcactacccggacgagttcataccgaacttcgacgcgattagcgagtcagtggacggctacgattgatgtctggtgacgcggctgagctatctcggctgcgacatctagaccactgccgccgctttcgctgctttgcccgggaacttattgagttcatctacttcgaactccccaaggatcaccctcaaggtccggcccacggagtgcggattactatcgaaggcaaaatagactctcgcctgcaacgaattttctcccagcggcccgtgctgatcgagcgagaccagggaaacaccacggttagtaatcaattacggggtcattagttcatagcccatatatggagttaacttgtttattgcagcttataatggttacaaataaagcaatagcatcacaaatttcacaaataaagcatttttttcactgcattctagttgtggtttgtccaaactcatcaatgtatcttatcatgtctgctcgaagcggccggccgccccgactctagagtcgcggcctcattaggaagttcctatactttctagagaataggaacttctcagaagaactcgtcaagaaggcgatagaaggcgatgcgctgcgaatcgggagcggcgataccgtaaagcacgaggaagcggtcagcccattcgccgccaagctcttcagcaatatcacgggtagccaacgctatgtcctgatagcggtccgccacacccagccggccacagtcgatgaatccagaaaagcggccattttccaccatgatattcggcaagcaggcatcgccatgggtcacgacgagatcctcgccgtcgggcatgcgcgccttgagcctggcgaacagttcggctggcgcgagcccctgatgctcttcgtccagatcatcctgatcgacaagaccggcttccatccgagtacgtgctcgctcgatgcgatgtttcgcttggtggtcgaatgggcaggtagccggatcaagcgtatgcagccgccgcattgcatcagccatgatggatactttctcggcaggagcaaggtgagatgacaggagatcctgccccggcacttcgcccaatagcagccagtcccttcccgcttcagtgacaacgtcgagcacagctgcgcaaggaacgcccgtcgtggccagccacgatagccgcgctgcctcgtcctgcagttcattcagggcaccggacaggtcggtcttgacaaaaagaaccgggcgcccctgcgctgacagccggaacacggcggcatcagagcagccgattgcctgttgtgcccagtcatagccgaatagcctctccacccaagcggccggagaacctgcgtgcaatccatcttgttcaatggccgatcccataacaccccttgtattactgtttatgtaagcagacagttttactgttcgtgatgatatatttttatcttgtgcaatgtaacaggttgtggccatagcgggcccgggattttcctccacgtccccgcatgttagaagacttcccctgccctcggctctggaagttcctatactttctagagaataggaacttcccgccagaatgcgttcgcacagccgccagccggtcactccgttgatggttactcggaacagcagggagccgtcggggttgatcaggcgctcgtcgataattttgttgccgttccacagggtccctgttacagtgatctttttgccgtcgaacacggcgatgccttcatacggccgtccgaaatagtcgatcatgttcggcgtaaccccgtcgattaccagtgtgccatagtgcaggatcaccttaaagtgatgatcatccacagggtacaccaccttaaaaattttttcgatctggcccatttggtcgccgctcagaccttcatacgggatgatgacatggatgtcgatcttcagcccattttcaccgctcaggacaatcctttggatcggagttacggacaccccgagattctgaaacaaactggacacacctccctgttcaaggacttggtccaggttgtagccggctgtctgtcgccagtccccaacgaaatcttcgagtgtgaagaccatggatccgggcccggggttttcttcaacgtctccagcctgcttcagcaggctgaagttagtagctccgcttcctcgagctcgagatctggcgaaggcgatgggggtcttgaaggcgtgctggtactccacgatgcccagctcggtgttgctgtgcagctcctccacgcggcggaaggcgaacatggggcccccgttctgcaggatgctggggtggatggcgctcttgaagtgcatgtggctgtccaccacgaagctgtagtagccgccgtcgcgcaggctgaaggtgcgggcgaagctgcccaccagcacgttatcgcccatggggtgcaggtgctccacggtggcgttgctgcggatgatcttgtcggtgaagatcacgctgtcctcggggaagccggtgcccaccaccttgaagtcgccgatcacgcggccggcctcgtagcggtagctgaagctcacgtgcagcacgccgccgtcctcgtacttctcgatgcgggtgttggtgtagccgccgttgttgatggcgtgcaggaaggggttctcgtagccgctggggtaggtgccgaagtggtagaagccgtagcccatcacgtggctcagcaggtaggggctgaaggtcagggcgcctttggtgctcttcatcttgttggtcatgcggccctgctcgggggtgccctctccgccgcccaccagctcgaactccacgccgttcagggtgccggtgatgcggcactcgatcttcatggcgggcatggtggcgaccggtagcgctagcggcttcggtaccacgcgttcgctcgaattaatcaattctttgccaaaatgatgagacagcacaataaccagcacgttgcccaggagctgtaggaaaaagaagaaggcatgaacatggttagcagaggctctagagccgccggtcacacgccagaagccgaaccccgccctgccccgtcccccccgaaggcagccgtccccccgcggacagccccgaggctggagagggagaaggggacggcggcgcggcgacgcacgaaggccctccccgcccatttccttcctgccggggccctcccggagcccctcaaggctttcacgcagccacagaaaagaaacaagccgtcattaaaccaagcgctaattacagcccggaggagaagggccgtcccgcccgctcacctgtgggagtaacgcggtcagtcagagccggggcgggcggcgcgaggcggcgcggagcggggcacggggcgaaggcaacgcagcgactcccgcccgccgcgcgcttcgctttttatagggccgccgccgccgccgcctcgccataaaaggaaactttcggagcgcgccgctctgattggctgccgccgcacctctccgcctcgccccgccccgcccctcgccccgccccgccccgcctggcgcgcgccccccccccccccccgcccccatcgctgcacaaaataattaaaaaataaataaatacaaaattgggggtggggaggggggggagatggggagagtgaagcagaacgtggggctcacctcgaccatggtaatagcgatgactaatacgtagatgtactgccaagtaggaaagtcccataaggtcatgtactgggcataatgccaggcgggccatttaccgtcattgacgtcaatagggggcgtacttggcatatgatacacttgatgtactgccaagtgggcagtttaccgtaaatactccacccattgacgtcaatggaaagtccctattggcgttactatgggaacatacgtcattattgacgtcaatgggcgggggtcgttgggcggtcagccaggcgggccatttaccgtaagttatgtaacgcggaacaacaacaattgcattcattttatgtttcaggttcagggggaggtgtggtcctgcgattccatcgagtgcacctacaccctgctgaagaccctatgcggcctaagagacctgctaccaatgaattaaaaaaaaatgattaataaaaaatcacttacttgaaatcagcaataaggtctctgttgaaattttctcccagcagcacctcacttccctcttcccaactctggtattctaaaccccgttcagcggcatactttctccatactttaaaggggatgtcaaattttagctcctctcctgtacccacaatcttcatgtctttcttcccagatgaccaagagagtccggctcagtgactccttcaaccctgtctacccctatgaagatgaaagcacctcccaacacccctttataaacccagggtttatttccccaaatggcttcacacaaagcccagacggagttcttactttaaaatgtttaaccccactaacaaccacaggcggatctctacagctaaaagtgggagggggacttacagtggatgacactgatggtaccttacaagaaaacatacgtgctacagcacccattactaaaaataatcactctgtagaactatccattggaaatggattagaaactcaaaacaataaactatgtgccaaattgggaaatgggttaaaatttaacaacggtgacatttgtataaaggatagtattaacaccttatggactggaataaaccctccacctaactgtcaaattgtggaaaacactaatacaaatgatggcaaacttactttagtattagtaaaaaatggagggcttgttaatggctacgtgtctctagttggtgtatcagacactgtgaaccaaatgttcacacaaaagacagcaaacatccaattaagattatattttgactcttctggaaatctattaactgaggaatcagacttaaaaattccacttaaaaataaatcttctacagcgaccagtgaaactgtagccagcagcaaagcctttatgccaagtactacagcttatcccttcaacaccactactagggatagtgaaaactacattcatggaatatgttactacatgactagttatgatagaagtctatttcccttgaacatttctataatgctaaacagccgtatgatttcttccaatgttgcctatgccatacaatttgaatggaatctaaatgcaagtgaatctccagaaagcaacatagctacgctgaccacatccccctttttcttttcttacattacagaagacgacaactaaaataaagtttaagtgtttttatttaaaatcacaaaattcgagtagttattttgcctccaccttcccatttgacagaatacacagtcctttctccccggctggccttaaaaagcatcatatcatgggtaacagacatattcttaggtgttatattccacacggtttcctgtcgagccaaacgctcatcagtgatattaataaactccccgggcagctcacttaagttcatgtcgctgtccagctgctgagccacaggctgctgtccaacttgcggttgcttaacgggcggcgaaggagaagtccacgcctacatgggggtagagtcataatcgtgcatcaggatagggcggtggtgctgcagcagcgcgcgaataaactgctgccgccgccgctccgtcctgcaggaatacaacatggcagtggtctcctcagcgatgattcgcaccgcccgcagcataaggcgccttgtcctccgggcacagcagcgcaccctgatctcacttaaatcagcacagtaactgcagcacagcaccacaatattgttcaaaatcccacagtgcaaggcgctgtatccaaagctcatggcggggaccacagaacccacgtggccatcataccacaagcgcaggtagattaagtggcgacccctcataaacacgctggacataaacattacctcttttggcatgttgtaattcaccacctcccggtaccatataaacctctgattaaacatggcgccatccaccaccatcctaaaccagctggccaaaacctgcccgccggctatacactgcagggaaccgggactggaacaatgacagtggagagcccaggactcgtaaccatggatcatcatgctcgtcatgatatcaatgttggcacaacacaggcacacgtgcatacacttcctcaggattacaagctcctcccgcgttagaaccatatcccagggaacaacccattcctgaatcagcgtaaatcccacactgcagggaagacctcgcacgtaactcacgttgtgcattgtcaaagtgttacattcgggcagcagcggatgatcctccagtatggtagcgcgggtttctgtctcaaaaggaggtagacgatccctactgtacggagtgcgccgagacaaccgagatcgtgttggtcgtagtgtcatgccaaatggaacgccggacgtagtcattctcgtattttgtatagcaaaacgcggccctggcagaacacactcttcttcgccttctatcctgccgcttagcgtgttccgtgtgatagttcaagtacagccacactcttaagttggtcaaaagaatgctggcttcagttgtaatcaaaactccatcgcatctaattgttctgaggaaatcatccacggtagcatatgcaaatcccaaccaagcaatgcaactggattgcgtttcaagcaggagaggagagggaagagacggaagaaccatgttaatttttattccaaacgatctcgcagtacttcaaattgtagatcgcgcagatggcatctctcgcccccactgtgttggtgaaaaagcacagctaaatcaaaagaaatgcgattttcaaggtgctcaacggtggcttccaacaaagcctccacgcgcacatccaagaacaaaagaataccaaaagaaggagcattttctaactcctcaatcatcatattacattcctgcaccattcccagataattttcagctttccagccttgaattattcgtgtcagttcttgtggtaaatccaatccacacattacaaacaggtcccggagggcgccctccaccaccattcttaaacacaccctcataatgacaaaatatcttgctcctgtgtcacctgtagcgaattgagaatggcaacatcaattgacatgcccttggctctaagttcttctttaagttctagttgtaaaaactctctcatattatcaccaaactgcttagccagaagccccccgggaacaagagcaggggacgctacagtgcagtacaagcgcagacctccccaattggctccagcaaaaacaagattggaataagcatattgggaaccaccagtaatatcatcgaagttgctggaaatataatcaggcagagtttcttgtagaaattgaataaaagaaaaatttgccaaaaaaacattcaaaacctctgggatgcaaatgcaataggttaccgcgctgcgctccaacattgttagttttgaattagtctgcaaaaataaaaaaaaaacaagcgtcatatcatagtagcctgacgaacaggtggataaatcagtctttccatcacaagacaagccacagggtctccagctcgaccctcgtaaaacctgtcatcgtgattaaacaacagcaccgaaagttcctcgcggtgaccagcatgaataagtcttgatgaagcatacaatccagacatgttagcatcagttaaggagaaaaaacagccaacatagcctttgggtataattatgcttaatcgtaagtatagcaaagccacccctcgcggatacaaagtaaaaggcacaggagaataaaaaatataattatttctctgctgctgtttaggcaacgtcgcccccggtccctctaaatacacatacaaagcctcatcagccatggcttaccagagaaagtacagcgggcacacaaaccacaagctctaaagtcactctccaacctctccacaatatatatacacaagccctaaactgacgtaatgggactaaagtgtaaaaaatcccgccaaacccaacacacaccccgaaactgcgtcaccagggaaaagtacagtttcacttccgcaatcccaacaagcgtcacttcctctttctcacggtacgtcacatcccattaacttacaacgtcattttcccacggccgcgccgccccttttaaccgttaaccccacagccaatcaccacacggcccacactttttaaaatcacctcatttacatattggcaccattccatctataaggtatattattgatgatggccaagctatttaggtgacactatagaatactcaagctatgcatcaagcttggtaccgagctcggatccactagtaacggccgccagtgtgctggaattcgcccttgtttaaacgcgatcgcttgagatcgttttggtctgcgcgtaatctcttgctctgaaaacgaaaaaaccgccttgcagggcggtttttcgaaggttctctgagctaccaactctttgaaccgaggtaactggcttggaggagcgcagtcaccaaaacttgtcctttcagtttagccttaaccggcgcatgacttcaagactaactcctctaaatcaattaccagtggctgctgccagtggtgcttttgcatgtctttccgggttggactcaagacgatagttaccggataaggcgcagcggtcggactgaacggggggttcgtgcatacagtccagcttggagcgaactgcctacccggaactgagtgtcaggcgtggaatgagacaaacgcggccataacagcggaatgacaccggtaaaccgaaaggcaggaacaggagagcgcacgagggagccgccagggggaaacgcctggtatctttatagtcctgtcgggtttcgccaccactgatttgagcgtcagatttcgtgatgcttgtcaggggggcggagcctatggaaaaacggctttgccgcggccctctcacttccctgttaagtatcttcctggcatcttccaggaaatctccgccccgttcgtaagccatttccgctcgccgcagtcgaacgaccgagcgtagcgagtcagtgagcgaggaagcggaatatatcctgtatcacatattctgctgacgcaccggtgcagccttttttctcctgccacatgaagcacttcactgacaccctcatcagtgccaacatagtaagccagtatacactccgctagcgcgatcgcttaattaatttaaatcctgcagggtttaaacggccggcctagggataacagggtaatcgtaactataacggtcctaaggtagcgaatgatgtccggcggtgcttttgccgttacgcaccaccccgtcagtagctgaacaggagggacagctgatagaaacagaagccactggagcacctcaaaaacaccatcatacactaaatcagtaagttggcagcatcacccgacgcactttgcgccgaataaatacctgtgacggaagatcacttcgcagaataaataaatcctggtgtccctgttgataccgggaagccctgggccaacttttggcgaaaatgagacgttgatcggcacgtaagaggttccaactttcaccataatgaaataagatcactaccgggcgtattttttgagttatcgagattttcaggagctaaggaagctaaaatggagaaaaaaatcactggatataccaccgttgatatatcccaatggcatcgtaaagaacattttgaggcatttcagtcagttgctcaatgtacctataaccagaccgttcagctggatattacggcctttttaaagaccgtaaagaaaaataagcacaagttttatccggcctttattcacattcttgcccgcctgatgaatgctcatccggaattccgtatggcaatgaaagacggtgagctggtgatatgggatagtgttcacccttgttacaccgttttccatgagcaaactgaaacgttttcatcgctctggagtgaataccacgacgatttccggcagtttctacacatatattcgcaagatgtggcgtgttacggtgaaaacctggcctatttccctaaagggtttattgagaatatgtttttcgtctcagccaatccctgggtgagtttcaccagttttgatttaaacgtggccaatatggacaacttcttcgcccccgttttcaccatgggcaaatattatacgcaaggcgacaaggtgctgatgccgctggcgattcaggttcatcatgccgtctgtgatggcttccatgtcggcagaatgcttaatgaattacaacagtactgcgatgagtggcagggcggggcgtaacctgcaggttaattaaggaagggcgaattctgcagatatccatcacactggcggccgctcgagcatgcatctagagggcccaattcgccctatagtgagtcgtattacaattcactggcc

SEQ ID NO: 54 - DNA, 30493 bp, Artificial Sequence
  pHCA(Ad35)
ggccgaaggattacatgagcttagaaatgtaattagcatagtgtgtggcatagtgtagataccaaataaatatgatctctccttctactcttgaaaatgcaaacacattcttggtggtcctaaaatagcctgtaacatggtttactcagcagcatttgctattcaaggcagatctgcctttagtcattggctgcgctcctgaacagctgtgtgaaaggctaacttttgtaaaccaaatcaaaataaaatgcagcaaaaatttgtcactgaaaggaaatcctcagtatatccttttatgaaatgaaagatccctcatccaaacttaacttttttaaaagtgcgcatttggagatatagccctttcttatgaatcctaattcaattttggccataaacacacgttgatgttccccaccccaaagcacatagcaacaagagtaggttctatattgaaaataatgacaatttaaaaacatgtacttatttcactgtatgtggacagtgtctatgattgcatcatgaagtgtcatataaccatgtacgtgtacatgagagagagatagagagagaagtggtagggtggtggtggtagaggggatggcgatagtaatcatggtaatggtagaggtgatggaggtggtaatgacggaggtaagggtggtagtgatgatggtggtggtggtaatggtggtggatgtggtggtggcaattgggatggtgggatggtggtagccatggtgatggtggtaatggtgttgatttaaagggtggtggtagtgaaggtgagggtagtggtggtggaggtggtggtgctggtagcaatagtgatggtggtgatggtgttgatgagggtgttgggatcagggtgagttcccacagtatatttcattcttgttgtaccactctgtcaacagcaccactgactgggacagaggaagaaggcacactctgaatgtgttattaacagaaacctcaaaacagtctgtctccttgtagtcattcaaaattatctttttcttacctggaaaactgaaactgaattaccgggaaaaacacaggagatttttgtttgttaatatgctgccaataaagtaattttatgtcaaatttaactacaggaaagggcaaggcattttctaagttccttagatgtcatgtggctaaaaaaaacaaaaggatggacagcagttagatactgtacacttagctgtttgaagccatatattcagaaagcagatgttgggagttggtgtttgaggactgatttcctggaggtattttatataggccaagttcattgttctaaactctaagggcttgacttgagggaggaaaagaggcaagaacatgtttagttttgctgacagcatcacatgggcagccctaaggctagacaactttagggcctgaagcttattctaggaaagaagcacctacagagtggcactgggctcccctccactatagagatgaagtcatatgacagtaaagggcaggcagggctgcctagggggcccagaactgacacttccattagaatgagcacaggccagggagagaagtggggaaccagagagaaggagctggaattctagtaggacaaacggtaagtgaacaacaagaacaagttaagagtgtgtgcagtattctttcaaagactgaaaaaatagtgatgtgatagaatggcaggtggctctgagcaggccaggagaaggactgggggcagagcatcccaggcaggagggcagcaagtgggaaggccctggggtggggcttttggactgttccagtgacgggcaggcagccagtgtgcctgtcacacaatgcaccagggaagtagtcgtgaatttgcagagggtcttgcaggctatgggaaagggattggattgtattttgtttgtagggaagccatcgggggacttaagcagaggaaggattggcttcatctctttgaaaaagttctctctggatgctgatgggaggagaaatggaaggaaaagaaacacttttaggggcaagaacttttgagaagggtggaattgggagtgtggagttggggccagctttggcacaggaggggaagctaaacacgtggccgcatgagggcctgtaattctacctgaaatgggtaccatttgttagggtaaacaaatgaaccaaatgcccagtgatacagaccaagtgttggcaaacttcttctgtgatggcccaggtagtaaatgtctcaggcttcgcaggccatgtggtctctgttgaagctctgtgtagtagacaatatgttaatgactgggcgtgactgtgtgctaataaaagtttatttacaaaaacagcccgtgggctggatttagctcacaggctgtagtttgccaacctctgacctagagcatgaactgagcatcttcttggagggaaataagttctttccaagttgccctcctcacattgcagggggccatgtaggcccattattcacagaagagtgggtgggcaacctttctggagcagaaaaacgtaaagatttcttccgtagtgcaagtaaggtgaccatttctaaaccgtgcaagtgatccagcagtcccaaaagttgtttcacttctcattgtgcgcccgttctcaggtgctccgaagcttccagtcctttgtagggacatggatgaaattggaaatcatcattctcagtaaactatcgcaagaacaaaaaaccaaacaccgcatattctcactcataggtgggaattgaacaatgagatcacatggacacgggaaggggaacatcacattctggggactgttgtggggtggggggaggggggagggatagcattgggagatatacctaatgctagatgacaagttagtgggtgcagcgcaccagtgtggcacatgtatacatatgtaactaacctgcacaatgtgcacatgtaccctaaaacttaaagtataataataaaagaaaaaaaaaaagagaggagagaaacatcatcccctccaggatacccttgggccttgttcttatagtcttgtacattgttgaacaatttgcatgggctagtggattaaagcacaccctccaccctcaggccctcaagggtctctatgataatacagtctcaccttctaccctttccatcaccatcctaggtgctatggccaaccttgaggctgccatgttaggtctatgcatttcccacctccaccacataactctctgaaggccaggtagtttcctattcatcttggtaaccccaaagcctcgtgacagggctcagctggcatctgcggatgtgaatgaaccattggagaaaatggtactctgcaaataactctgttattttcccatttcctgtgtaaggcctagagacaatgactttttaattgcaccccttcccctctgtatgacactggccttctcttgtgtccagcaatgtgggtggcctagatgatttctaagggacttctggccaagatgaacagcagctgcatcttactgagcatttactatgtgccatatactcagccacagctctaggggcatagaagcaggagctctcagggtcagggcagtgagtgagcaagcgagcacctatgccagccctgcctctggatggggacttgagagggtgatggaagcctgcagcactggagggaggcagacaaagacaggcctgtgctgagggggcccggagcaagagagagggaggcaatgacagcagagacatgcctgcgccttgggtttgagtgcccagtggtcaaatccacttccctgtggctgatgcttgcctttctaactttggaatttaggggttggagatctggtgagaaggtaggagggagatgaggaggagaagggaaaggcaggaaggaaggggagggaaaggaaaagcaaaaggggaggaggaaggtttccaacaaattattctatatcaactgcggaaatcaaaatttgttgcccaaatcttagaagctcatgtccctcctccccagaagtctggaatgcagcactccaggggtagcttataacccaaatatctatctgtaaaaagagaaacattgggctttcgagctgtggattctcagtaaaagcaagaggcctcagcctacacaggccagcccagagtttgaggaaccccaggcccacacccacagggctggcccctgggtctgcatactccctagaaatgtgcacacttctgagcctcaactctgtcctggagtctaacagcatccctctccttcctggggcagttccacctccagaaacctgttaccttgggccttatgtcaaggaaactgtgggaaagagctaggcaggaatgcagatgaggccagcatgggctcctaaaagtttagaaataggcagtgtcatgctcccaggtgcctgcataaaccagctgaaaaatggagctcccctcaccagcactctcccttcaaacagactgtgatttgcaggtcactggtttaccaagccaggctacccaggcaggacccagatgccaagcccagtggtgtcctgcaagctgagcagtgctcagttcttgcaaaaaaaggtctgtgtgaaggcaaggcctctgcctggcttctcaccccagttgggtgtctggaacaggaaggagcccttactgcagaaaaaggaggagggagcaaagggagcgaacagctgcgtgctccatggggaggatccccaaagtagaaaggcgcatacacactgcagcccttgacccagaatgctcacagctacattacagattcaggtctcctcagtgtagtggggctgctgatgagactgtggcatcctcaggggtcaggacacacattttccatcactcttctgatggcaaaaaacctctgagccaatgccaacctctgatcattaaaaaaaagtgctcacagcagtgtgtggtttaggatcatgccctgtgtggtttggaacacgtgcacaaccacaccttgttcatcaccatcccagaaaccctgacgcaggcaaagagcagagttattaaccctactttactgatgtggatactgaggcccagaggctcatgcaagttatcaataagtggcagggacagttgcctctagattaactagcccctaggatcacctgggtcttggaaggggacccataaacatgagctcccctctcttggggccagatttgcacctgtgccgcgccttcagcctgcatgaagtaggggctgctggcaaagactcaaagctgtaaatctgggttttctcttgaggcttctaagggagctgtttcgacaactcactctgttcccagctggctgcccctgcatagggttttaaagcagcctagctttctgccaggcttggcagtggacaacgctggtcagaacatcccagagagctaccagaatgaagtaagtttgcttctactctttacctgtttatgggctgtctctgccactggaatgaaaggcactgagaacagtgcctggcctgcagaaggccctggaaatacctgagctcctaatctgggaataggagtaggaagagctttggaggcagggcacctgagtttgagatctacaacttcctgcctgtgtgacattgggaaagtctccatcctttctgagcctcagtctccaccctggggaagtggaaatatcaatctctgtgacacagaagcaaatgagcgaatgtgcacaaagtaccttgcacaagagagacgctcaaacacttgcctccaggtttcaccgagaactacagagtaagatagatttgttcccagtggaggaagcctgggaataatttgcccctagactatgaattcctggggctcaagatcgagcacagggccaggcacacagaagggaccctggaaatgtggcaggaggccagagatagacaggcccttagagctcatacccatgccctctgacctcaagaagaaagaaacctgctcaaaatctcacaaagagcttgttccaaccctgaatcgagtctgaggactccttcctgagtccagcactttttctgcaagaagtatatgcctccaaagctgatgggcgcaaatcttgaaccccgtcacataaacacaaagggaggaggtgactagagctcctcctactggatatgtctaaggtcaccagtctaaagaaaagggatggatagaatgaggccagtatttttgcagccatccaaatgtccacatacgctgttacactgagggctcctctctcccccgtcttcagccctacttgcatttagaggtgagaaagatatgggctgaggggttgtttttcatcgtattgtagatggaaagcacactgcccttggggccatccaaatgtggaccttgatgtagcaccccaccttctggatggccatccttctgaaagtcactgaatttctcagactttattctctttatccataaagaaggagaataataataatccccccaccctgcccaaccactgactggttgggaagctcagaagaaatactgggcacggcatcccattgtaatctatagagtgagtcgcttcttaatattaaatggctgaacacagaagatgtgcaaaaagtactgtgtccccttcctcctccaactgaacatttcatgccctttgcaccctcattttgtctaggagctgccttatgaagggaataggtacctgctccgagctggaggaatctttgccacttatggtggggtatggactgagacagagatggcatgtgacatgcgcactgagtctcaactccatgcaggctctggagcactctcaaattggagtactaatgccttttaaattctcacactagcaatcctttgacctactgatctagggatctagggaaagaatcgtgatcttaacttcaaagggaaggacaaaatgttctgcctcctgttaaaactccatacactaagtgcagagactggatgccttattaaccttgggtagatgcccaaatgttcaaaaggtcaaactcttctgttccccagatcgccagagtcattaaccagtcacactattaaatgaatgaacagatgctgaaaaggtacttgcattactgagatttcttatggtgatggcccctgcctgatatgtattcagcattttgtagttttcaatgtgcattagagtatagtggtgatgacattggcctctgagtttgccacttcttatatctgtgactttggtcaaattgcttaatctctctgagtctcggtttcctggagataataatagcttcttcttcccagggttatcatgaggattacaggagataatgccccaaaaatgcttagtaaagtgcctagcacctagtcaatgctgaattaaaggtggttattcttacttttcgttcatttgaactttgttctcagggagggcaaaggatagacaaagccccatagctagtgaggagtagctgcaagactagaacccaggtgttctgagccctagtcttaggccaagaacaactgttacgtgagatgcacgttttccttcaagggagctcacaattatttccatgtaaattcaaggactgctaaaagagaactctcctctgggactgatatcattttatttcaagattgatttgaaacatgttttttgtttgtttgtttgttttctaggaaagaacaagagaaccagtcaagctgaatgcctgaagcaaatctctgttagcgatgttttcaggatgagggagagtggtgcaagaaacgtgcttccagatgcacatggtttcctgggactagggttcagggtgtcatccctgggtgttattaagtgtcagaaggagagcaaacaagggaaacatctgagatccagctaaggctacaccctggaaatgcaagcccagctcttgcaaaggacctcctttggccactcaccttccaggccttacaataacttgtttggactgcaggtttcttggtggactcacaggccattctgcttttatttggtcaacctcagttcacaagcacccagatgctgagatcctcagcatgtgcagcagagtttcatattagcactgggtacctttctgaggctacagggataccgtacagcagcacctgtcacgtccagccaaaggagtgggctctctcaatgtcatccaatgctgtttcaactgtgaagaagaccatctgagagagttgcttttggaggctgaggcaaatttttaaaattctttgttctcctcaactggggtgaattcttggtcttctaggacagcttgaagttttagaaagagtcaagccactcagaaccaacagagaactctttcagagaacaaggtgtggcatagaggaggcagagggctgatcttgatcaaatccaaagtgtgactctaaagcaatgaatgtgaatttttggcaaagcttacaaagggctctaaaggccatctgcaaagagaagccaagcctgatcgatgaatcactagtgcggccggatatcgatcggcacgctgttgattttctcatagtaaggaacagtgggccctttcagtcccacttctgtagtctgtggtactacaaatggtgagcccatgatgttgccattcatagggttattctccagcagtaatgactggccagccactcccatagccgcagggctaggatttattgtcaatggagggacctgcagttctgcacaagcagtactaggatgagcacctgggcccattgcaagggtgacatcttcaaggcaaggcctcttaattttattagggtagcccccatcagccatgtctggaaactggaagtggtcttcttcttgtctcctcttaacagttccctgtgaatggaagagaagagaagaggagaagagaggagaggagaagggaagagaggtgacacacacacacacacacacacacacacacacagagagagagagagagagacagagagaaagagagagagagagagagaggaatttttataaaggtttggcacattaaagctaatgaacaggaaatgtgcatgataaaacagacctctcagtttaaagacttatagttgtgaaaactataaaatacagcctgtctttggaaccatagtgcttatttattcattattatgtttcatctaaactgtctaattacatttcaaataaggcattatgttgtctgtatactaaaacgggatagaacgttattcaaagggtaatctgcccacttcaaggagagttcaacaaaactatgcagaagtcactaaatgaaccatgctgccaaaggcaggcattggagagaaaactagaagtagctaaatagttttaattctttcctgtctacagacacatagattttaacgaaggaataccatagtatagaattgaacttttaggctgccttctagtcttggttaaatgcatcaggctgcagtggtaaaattgaatacaacagagcccttacaggaaagaagtagatctggatgtgttttcttggggagctgtttaaaatactgtttttgggaaagcacaagtttcagaacagtcattgtaggcatcgtattcattgttccatttatttttacacacacacacacacacacacacacacacactctcacacattgctatgtgtacacaaaaataatttggaagaacctatacccaacaatttggagtggtcatttatttgggatgactggcaattccctttctattctcttcatttctgcttgtttgtctttaacgagaacgactcataatccaaaaatttaaaaaagtataaagttatctaaataagaaattttcctctgaagatgcatcctcaggttggggagatattaaacaatgagaaaaggccccaatctgggatctgaaccttgggggagctgcccatcatttatagaagcacagcctttgggaacaaagcaaagtcactagcaatgtgagacttcctactcttcatggcttcatacagtcatccatcgctgttgtgttaatgaccatgacctgtatgttagcaggtaaatgggaaaggaagtgggggcaaaggagtatgtgcaggaatgatcaaaataaggaaaggaagagagggatctggaaatcacctgaatgccgataggtgaacaggtagaattcttttaaagcttcccccacccggtaccccccaaataacccctttccagctttggaagtttcactaggacatacagtgctcatcctctgatgtcaccttaagtttggctcttctggtttgatgagcttgtagcccactaggagctcaaggcatgcatggggccacttgccagcacgatgaggggcatgactgtcatggccaagtgaacatcaaagcagatccccagggctgtatgtctcaggccttggtgcacatcagaatcacttagaaacatccacattcctgggccctcccaccacaaactgacagcttcatccagggtgtggcccaggcatcgggagtttttccaacagctccatggctgattctcaacagaaaaccactggcccagagcaagggtggaggcagcgtggcatagggctctgaccttggccttgccactgaacctctcagagccccagtttctttatgtgtaaaatgagtgtaattatagttcttttctcatgaaggtgctctgactattaagtgaaacggggcacattgtatgacacctaatagctcctcactaactggtacccggcattataaagggcaggtatggaagggttctgggagtccaatacccttcttaaagacagagaggtctctgagacccagagaggggcaggccttacccagagttgctcagccagagggcaacaaggcccaggtcagatgcagggcccctccaccaccactcagctgcctccagacccactgccttcgccatgttgttggtaggacactgcatcgcccccacagaaggggcttgccaacttgagtgagaggacttgcacacttctttgacttttcttttgagatgcccacaatctgaacaagggcacttcaagggacagctctgtcaccaaactcatctgaggcctgaataccatgggtcaggcaggaatgggttggagaggtgtagagcaggcacaataagagggctgaggcccatgcagtcatcagtgcccactttcccaggagtctgactgggcacagcacccatagtgtccctgagctggtccatggagcagctcactaactgtttggcccacagcaggtgctcagtaaatggcagttgaacgaatcaatggacaaaggaacataaattacccaacacacagggagctcagccatttactcaatccattatggagtaacctacaaacaagccactgggtcccaaactgaaattgtgtctcttctacattctcccaaagaatccaataggttaaaaatagaaatgtatgaaatagatcaatcagggatgattgcatgtggatttgacataaggatcccctgcagggagtctgagctggcaacagtcaggcccaaagtgctgtccatgatgtctcgaactgcaagacagttttaacaatggcgaagcaatgcagaaccaggcaggccaaggagggggtgggggttggggaaaggaagggagggaaggggctgtgaggggcaatggtctggcatccctgccacgtgagcctctgaaatttgctggcagcttctatgggctcccagagctttcacttaattgttggtctgccactaacctgctgggagtaaggtgcagggatggaggaggcagggcatgaccaccagacactaaaggtaccagctggggccactggcaaagggaaggaggctgcacctctcctacatgagagcccgtatacacacaccttttccagcactcatcaactgcatcccaagcaaatggtccctgatcaattccaattctagaaaccaactgactactcaataacaaagtagatcccagcaggccgccactgctggagcggatgccacttttgctatgccaagtctgtggctggacagctgctggcatgtacactcactgactttcataaggatgcctaataaagggggcaggctcacctggcttttctcaggggtggggtttggggtgccgatagaggctgctgttttggcagagtggcaagctgcaagcctcttctgagctttcatttttcaatggacttcagtgagaattcactttgtcagaggccatgcagctccatgttttggatttcatggaatgagctttcaacagtgagcctgaagtgccctggctgaacagcaagaacaccagccaaccctaaacaaggccgaggagaggcggctgtgtttacacggaaggctcagccttgctgtaatagcgtctgccttcaccagacatcagtgaggcgtggaaatctattatccagttaattttgcccctagataaagacttgctttcgtgtcttctctttcacagtcccatgatctgttactcatctcaactgcgagaagttggctgggctttcccctgtgcccagtgccacactcgtgccttcactgggtcacctgtgcctgtggctgatgccgctgaggttttgcctgcccagactgggtgtttctgactaaatcccacagccaccattttagatcaagggcaggagatagctcactgctccggaatgacctcccctcccagaatcctggtaggggcggaaggtccccaaccaagctcccagccctttctaaatgaatctccctgcttcacccatgtgcttttctccagtctctgcggtcttgatgacagcagggtattagtcctagctgtcccacagctcctacttctttcaggcctctccctgtgacaatcagtagccactggcaggatttcctcagagcatatctcgatttgctttcagacaattagttaaaaggacactggaccccagacgtcccaactcccagccagagccctcacaggcccggcctttggtggtgaggaagggggagggagtgagtgacagtgccctggcatcttttagaaacgaattcctttctctccatacataaatgcctgcagagtcccatttcagaatccggcagacaaagccaccaatgtgatccccatgaccttataaacattcattaaaatgcatttcaaggcatgtgatggcctccccaccccctagataatgagaaaacaaaggtttctcttctgatagagacaagttcagctctgaagtcaacattatttctggttctgtctgaacaatgacatatggcaactcttccctttctatagttctagtccagaatgacaaaaaaggggaaaaatttcttagagaaggtagagattatacgaatacagtccatgaaatgagcataaggagaataaagaatataacttatccaaagaagtctggcaggctgttataaatgcttgattttggacactgtagttggaggtttaacatggacaccaataaaaaggtcagcaaagggtatgcactgttcctattgggcaagaagataggaggtcaaaggtaaccaggaaagataaactcagggagacttattttccctccagagggcactgggcttgtaggccctgggcaaaattgtcaaaaaggtgaaaatcgcctgtggtttatttagtctgctctttcttcactagtgcctcaccagttcagttcaggccaatttgctagccagttctcctagtctcttcccttacatccatactccatgaacaactttattcaatattgttacattttccccctatgaattttgaggcacctgatgttggccaactaaattagacttcaagccctctgaggacaaggatggcccccagtagactatctcagaagaaagtaatgaagatgtcgtggggcatgatggaggtagctgtagaatagataagaaaataatgtatcaggaatgggtttgaagagacaaagagatgggggatggagagaaagagagagagtgagagcgaggaggagagaaagacagaatgaatatgtttgcatttgcacatgggatcaaaggaatatccgtgtgtatagtatcaatgcctgtatttggggatgtgttatttacatgtttattttcagcagaatgtcccagcaaactgaaactgatctttctgtagaacaaacaggattttgagcatttccagaattgcaagacatgaggctctggagaataccagggtggttgggaatggcagggaaccctgaatgctaatgctgattggcttcaagaggagtcagttatgtctcaggagcaaatctctgataatgggtggtttggagcaagaacctcgacctacaaatcggggatttattggtgtccctgattcgccctgaaccagcactcgatgcaggcagatgcaggctgcggtggaggaaggggccctggaatgcacatgagaagacctgcagttaagtcctagctcctccgtttgttgtgtggctgtgggcaagccactcccctccctgaagctcaatttcttcttctgtaaaatgggtacttggcccaccatgtgtgcttcacagcattagtgaaaggttccactgtactcactgaggagagcacttggggagcagtaatcactactgatatcattctcaaggccctgtgtctttgtgttgggcctctgttgctttcttacaaataaggatgcattcactaggatagggggatggagtggaagtagggggaggcaagcagcttagtcctgacagcactgacctgacagcactgacctgacagccagggatgctgtcttggtggctgagcctggaaactcctgcctcctgctgcttgccaccacctgccactctgaaggctgccacagtcatcagcctttagccaccctgacctgagggctggggcttcaacaggcttctgccagaactatctgagcagcagcctggagtggctggaagtgcactgacaaaggcagagatgagcaaacctgggtgggcagtgttctagaactactttctccttttctgtagtgtagacatgccagttggaagaactgacagctctaaggatgatcctcaacctatagatgtatatgaatttaatgagctcagaatttgtattgtaccatctcctgagaagaatcaaggtattctgccattgaacaagcatttgttgagagctagcctctaactcctagaccgtcagaactgctgggcccttcaagacgggctgctcacacccactcatgttaagcctggtgaggcctgtactctgttttcacaggaagaaatcctcacccagtcttccccaaacacattcccaggttctgtcattagtgggatagagatgattactgtggggagaagagaaacatctggatggatttggtgaggttgatctatagaggaagtaggtgctgcctgaggtagctgtaatagaagctaaaggtcaaaggagagggccctgtcccaatccagatgactccacttctgctggacccaggttcacaagcttaatctacatttcacctaaatttggctaacaagcccaaaatcacacaggcaaagggagaagtggaggcagaaccgaggttggaggccaccagggccaccgggcagagatcatttaagcccaaccttctcacttctccctgggctctgcctctcttaaaggaccttgtggtgtgacctcttgtaggtccctttcacactcggggcctcagtttccccactgtaaagtgaatgggtcccagctttggtaagcttatgcttacctgatgctttcttcctgggctgctcttgtagagaaaagataaatcttcttcctccatccacgagggcttctttccctgggggtgagagtaggctgaggagagccacttgcacacactcttaaagaaagtattacctgcaccagctcagtgagaggcacagatcagactgttacttgaatcaaattatgagcctccccaaatatatctatgacatttaaataggggattacttgaacatagactttgggatccggtgtggagtgcaggagactagcaaagtgaatcctgagagtagcaggtctgcacctgttggatcgagaaaggcggcctacaattctggtcaaatgagctgtgcttattgacatattctattagagagtactaccaggtcaccagtcaccagaaaggctgccagctctccaaccacctccagggaactatcctgaatggggccttaacaagcctaagagagggttggtttgggtcccaagccaatatttgctctgctttatgtcagtcatatggaacccaaaccaaccctctcctatgtgcctcaccagtcggtgcagggatcccaatttcaagtttggttttttatggtcaaagtccagcatagattaaatgaaggggtgtgatgatggtgttaaaagagaactccagaccagtttaactcttggacacacatcccatctcaccatggtgcttccaaccttccagagatgatgggctcctattttctgatgacaaagccctccacaggattgctgcctggccatcagggagtgcctctgtaactgaggctgagatcccactttcagtcctccagctgtggcccatccctgctccgcccaccgggtatggcctgtcctaggctcttaggtatggctgcattgtgaaatgatggctacagagctggcatctcctgtagtctggttcatctagtgcactacctcatagttaaaagaaatctgtttaagccactgagggtggctcctagtgccaactccaagaacaggaagcttcccttttttgggaggaggggcagatggtaacatggatcgtccaggtcaatgggagcagggcaaccacagtaagtactggacaacaacacaaaactccatgtgtggcttccatcgagtccctctccaattggtttggtcttctccgtcccatgcagcactttagcaaggggcctggctgaaggctatgaattgtgtggagcctcctcattgcagtctccaaccatctgatgctgggaaaatgtcaccaggatgcagccatgccgtgtggccaatgaaccgagaaaacaccccttttctagaatgctctaaagaggcagaataatccagaggtgaggaaggaaatactccaccagagacccaggcagttcctacaaaagccagactttccttcacctagggagtgacaagaccagtggaaaacactctcaagcagtaacccccaaatgctctgcaagccagtggcgtccagataccgcacaagcgagtgggctgtctaatcccatcatcatgatgtaaatatctctaggctgccctgggctgtgcctgaccctgtcttcagctttccacacctccacctacagcccatgcacagaaggaccacccaggaatgctgcaagtgtggcacctccagggccacccagggagaaggagggcagctatgctggtggctccaggcccatttggcgggtggtaccttcacaccacaaagcccaaactgaggccccagatttggctgatgagggcatattggacaggggtcacttatgctcttccccattgccacctggcctctggctacctggacttggctacctgtggatcctctcacaggtgccaccatcttggctgagtctccagatgcgaggtccctgaggcagtggcaggcttctcgctaatgctgatgggattaggaatgggataggtggggagggccctggactgggccctgatgagccaagtgggtttttagaggggctactggtacatttcagggacaggacatctggtagagctaagctggggcaataaggagccactgctaatctgagagctagaaacaatcagcttctgggtcattattaattagggtagtttgggctgtgtggaagtcacgtactatatggggtagccacagctctctctacagataatctctaagacttctgattgggaccgtgtgaatgcagtagcaatatctcttcttactgccaggccctgccagtcctgcctccacgccctggctggccccccttatgatctgacccatgccaggctgccatagtatgttacttctgcattagcactccttgggacctgcctctccactgtccctcagactttaaagaactatacaaacccaaggggctcttcccaagagaattgatatgacttgaggtgattccatttctggaagtagtcactccattttctgcctcactctttcagtgcttcacagagcaggttcgaacgaaggagccatccaactaaccgtcatgttcgggcaaccgaagaagggagtggcaggatttcctttggagacttctggaattagacagcagtttaatgcaagcatctaaattctcttcctcccagagtctcattaaaactacagtaagagtttgtgttttgttttgtttttaaagacaaaatcccaccaggatagagagaataggagaggagataacagcatcataatttatgaaactaaaatgcagatagaccaggattaactgactacacagcaccaaggaagctgaatcacaagacagcagaggagaaaactggaaaggatcgtggtctatacggcagaatcttcccaagcctcaggaggaggagctctagatgttcccagatctgggaggtaaagtggaatggggggacatggtcagcgtaatggggttgggctggaagctggttaaggagcaggcagatctctgaatcccctctctgactctgtgtccccaggcatctgcctgtcccccaccctggaagaggtctggcttgaccctttgtctggtgaatttcctgctctgctttcctggtcctgctggccagatcagtggaggccactcacttcaccccacagggatgttctgtgttgccctacacctgggaactggaggtactggaggcaggctgtggtgagcttgaaagcaaaacacagagggcagtccaatctctttggccatatttcttctgcatatccaataccatgtccacaactctgctagtgtcctgatggtggtgggctctacacattcccgggaagctgaaggcagataatgaccaggacaggtcaacctctcttcttctgaaagccttcatctactaatggcctgggactcttcccttaaatgcttagattgtgtcttccactaaggttttttgctgttgctgttgtttgtttgtttgtttgtttgtttgtttgttttgagacggaatctcactctgtcgcccaggctggagtgtagtggcacaatctcagctcaccacaaccttcacctcctaggttgaagggattctcctgcctcagcctcctgagtagctaggattacaggcacatgccaccatgcctggctaatttttgtatttttagtagagacaggatttcgccatgttggccaggctggtcttgaactcctgacctcaggtgatctgcctaccttggtctcccaaagtgctgggattactggtgtgagccaccacacccggccaaggtttttgtttgtttgtttgtttgtttgttttgtattgaggcagggtatcactctggtcacccaggctggagtgcagtagtgcaatcacggctcactgaaacctccacctccctggcgggctcaggtgatcctgccacctcagcttcccaggtagctgggactacaggcttgtaccaccactcccagctaatttttgcgtttttagtagagacagggtttccccatgttgcccaggttggtctcaaactctgggctcaagcgatctgcctgcctcagcctcccaaagtgctgggattacaggtgtaagccaccgtacccggccccgccactaaggttttgaaaatgaagcaattacaagtttaagtctattaataagtgatgaagctatgtagaaaagcagaataattatcttggatcaggaaggtcacatgaggatctacttgggggttgtcaatattctatttcttgacctgatcagtgttgacagcaggttttaattttttacttctttttgtttgtttgtttttgagacggagtcttgctctgtctcccaggctggagtgcagtggtatgatctcggctcactgcaacctccgcctcctgggttcaagctgttctcctgcctcagcctccccagtagctgggattacaggcaggcaccaccacgaccagctaatttttgtatttttagtagagactgggtttcaccatcttggccaggctggtctcgaacttctgatctcgtgatccgccctccttggcctcccaaagtgctgggattacaggcttgagccagcgtgcccggcccattttttacttccttattaaactgtacatataggccttgcacacttttctgcatcaatgttatattccacaataaagggaaaaggtatatacacaacttgataccagtaatgtgaaacatatatttctacatagaaaaaaaaatgactgaaatactgcactccaatgtgttcacacagtagttgtttctggattatttatatattaaatgtttatatattgtattatgccatgaggtttgtgttttctctccacttttctgcattttccaagtttactacaaagagcacatattactcttataatcagaaagtcataaaatatatttaaaaagacaaaattgaaactaataaggatcaacacaaaacagatgagccatctgtggaaatccgcacagaatactacctaaagagattggtgacgtgcatgatctcactaggatgagcacaaagcttgccagagcctagggtctatttctagggttggctcttggaagccaggatagttgttatctctgggaagagggaggggcacacaaggggcttctaaaacattctgaatgttctatttctgaacctggttggtgggtacatgactgttggttttattattatatgttttatatactcttccgtatgtatggtgtggattccaaaaaaagatttcctttagagaaaaccagaatcacataagtagaaaatatggtgctatgttgaaggaacaactcaagtttatataaaatcatcatcatttataggcttaaaaagttgctttggaattttggtctaactgacttgtcttttctgcagcaaaccacgctccttctggacgtgctccaggcagaggggattagggtgggttcaaggctgcaagtacctagctcagcacactctcttcaggggacttagagtttgtctggtgttggctctctgagctcttgtcaggaatgccgacccttccgaggttcaggatttgaagcctgccttcccaccccagatttggtccacacagacactcaagtatgtatttcaactacaaatgacctgtactttcctattactcctctctttcatggtaacctttctggtatccttccttccctacatttatgggagggggacatcattctctgctctcctgtcactgaaggctccaccttctgtcttcttctgacccatctggttttcctggggccacctcctctccttaccaccctaacgcttttgtaacttgaggagaaatgagagatcacctagtcaggtcatcattctctgtagatgaagaggcccaatggtttgctcaagaattgccaagcgagttaaagacagagagtatgagagtcagcaagacctacagaaagcatctatctgcactgttttgcagggacttagcctttgtgtgtggactcctggaatgccacccactaagaaacattgtctgacaccaactccccacttggtaggtggggacactgaaactcatggcaggaaagggccttgccccaagccagggcagagtgtcactcatcactctcaattttcagtccagggcaccttgttgtgactatcccaaaggcagccactttccctggtctgaaagacctgaagagagaagagaagagaaggatggaaggcagagtatgcggctttgattcatttcctggtgaaaacagatctatacgagaagcaaatttcacgaaagggaagagaagaaagtgtcccatacgttgctggcctgtttcaaccttgctttgattcttgctgaaaagggtaccgtgtatttctgagttcaacatgcagaccagtgttaggaaagccactgcacctccactttagcctccagggctgtgccctgcaaatggcctgcagccttggtgcctcgctctccagactgcattttggaagatgggacagaggcttatggaagcccacattagaacgggggagcagaatgggtgagatgagggatccttgatagtgaaccagatgaaggaatggtagccaaatgccaggcctcctttgtggcttcaatccaaaggctctggagcccttccagggcagaacatcaggcatgtttacccccactgtcctcaacagtgacagaggtgcaatcttgggcagctggccattttgaaagcaacctccttaatctcaactgggaaggctccctagcaggacccctgtgttgcacacctggaggaagctagactaaccagaagctcagcacggttccatctgggatgcccaggtctgagacgaaaaaggtaactctcttttctgggtcctggcccagttgtgtctctctccacctcattctctgagatgcctgtctccccttttttgtcccatcaggaggcaagagctatcactgggccagactccaccagaagccaagccagcttgttacccagcttctcagggagcaaagaacagccttgtttctatcttatccccactgtcccctgcccctgccccacctcccagccattcagcttctggcttccccagagctgcctgcttctttgtggtcctccattccttgaaaagaccttctagtcattagtgtatataaatggccacttagcccagattacagtgaggtcaacagctggggctctgagaattgtcacacactggcacaggagaggaggctattcttccagagaatttggagggcactcccatccacttacaacaaaaagcccatccactgtgcttggcagtaggtgatctgagaaccaatggaaccaggttaatcctgtggcactgttgagtgaggagagcagtggcgggcactggaaaatatcagagacaaggcaggagacctgaaatctaggcttagctcctcatatacttggcagctgtatgacctcagacaaccagtgttacctctctaagcctcagtttcctcatgcaaaaggagggggaataacaacagagcccactgcttgggggtgttgtgaggacaggatgaaaaaacaaacagaaatccctcagtacaggattcagtgcagtggacagtcttgcaaggtctggttcagccctccacccctaccctcaccagtataaagaactctggcctacaagtcagatgacctgagttttaatctcagctttgccattagccgtgtgaacttgagaaagtccctttcctttttacatctattgggatgatcatgcattttttgtcctttattctgttaatatagtgtgttacattgattgcttttcatagactgaaccagccttgtattccagggataaatctcacttggtcatggtgtataatcctttatacaaatgttgctgggttgagtttgctagtattttgttgaagatttttatgtcttgattcataaggaatattggtgtaccttccccttttatggccacagtttccctacaatgatgtagtcgaactagacaacctccaatatctttcagtattcatgtcctctgattctgtgaaactaagaaaattaagaaatagtgattcataggcacaaggcaggcaaaacttagactccttgtagaataattaggaagccaaatattcagtgtgcttatttctcaaataaccttagtttctccagtctgccccaactccgaggcctgaatatctctagatgcttatgatggcaactaaagcctaaaagctaattcattttaaagttcttccaaatgcatagggttttatttttccagacctgggttcagatggggaatttgacaaacaatggaaagggggaaaaacaacaatctaaacactgagtgacaaagtaacaaagaaatagtctagctatcagccagtcaagccagccttggctttgctatccaaagtagtcagtctaattctaccaccagtttctgttcctgtagctgtctactgcctgccagggactctgccttcccacccacaactaccaatggaaggatgtggtgaccataccagtggctgctgacatctcctgccatgggaagcataattgcctccagcagcctcccccttagatccatcatttttgttgcacttggcctgggctgtactcccggccaatgactgaacatggtgagcatagtaatgcaggcccatttctgtgaggagcaggactcctccagtaggtgactttggctcaaggactctctattggcctggttgaacttttcctgaactgtgctactgtctgagactcttcttacccaatcctctttctcgccccaattgtcacagaccacctgcattgtggtctgagtctctccccaccttctcttgctcttccctgtttatctttcacaggcatttcccccagtacattccttgaatgtctaacccgatacgggtgcctgacttttggcagacctaagcagacaaaaaggagtacttggttacctagctcttctttctaccacaaacatcgagggaaccctttttccctcacccctctgccacacccccactgccccagtgaacaaccacagagagagctgtggtataatattaggctggtgcaaaagtaattgcggtttttgccattacttttaatggtaaaaaccgcaattacttttgcacctacctagtatttgtgtccccccaaattcatatgttgaaacctaacccacaatatgatgtcattaggaggcaagaccttgaggaggtgattagatgatggggtggagctctcctgaatgagattagtgcccttataagaagaagcccaaggaagctaccttgactcttccatcacatgagaatgcagcaagaaggcaccatctactaatcaggaagagagctctcaccagacactgaatctgccagtgtcttgatcttgaagttcccagcctccagaactatgcataatgcatttccattgtctctaagccacccagcctatggtattttgtcatagcagcctgaactgactaagacagtgagccacatgagaagtgccccaacccctcccttaagcacttggctcacagatcagtgggttcatttctgcctgagttttattgttattctgtagatttcttgggctagatatatttttctgttattttccttcttcacctcagtcatgaattggttgttttaaaaaagacaatgtaagtcatggggaaactcctgacaactctactctcctagggttcctgataaaaggggattcagttgagtcctctgatggtctctacctgccaaagtccagcagcccttagcaaacatgctgctcgtttctgtagagaaggtgctggtgtcccaccatacttctctctccctcatgaagggcttgcgacccagcaaatgggtggcttatatgggtctgtttcaaaggaagagccagctctgggaagaaaaacgatgagcataagcataacctaccactgtgcctgggaaagcagacaacttttttgatgtgtgaatatctaatgagaatggaatccatcaattaccttaaacttaggcacagtcttcaaattcaatatatgtgggatatacttttagtcagtttgtagacgttatttgtaataaataatctggcttctctaaagaaattattttaagtgtttggtttggtttgatttaatggtaaaattatatttagtggcagagaattatagcaatggtgataaactatagagtgtcataagttcatatcttattctcacatttgaagctgcctgcagatgcattcaagatgcagccagaagtcaggagactcaggctgttatttggagctcatcattttacagccttgctggactcccactttctcaggggaaaaatgtggtgttgacccagattagctctccaggccctgctgagttgggcactctgtaagctggagggtcttctattgtcttcacctaagtgtcaatcaacaacccaaatgggcatgggggaagagggagctgggccaatgcccagggtgcctggtagagagataccttgggcactggaaggcaccagcttcccagagagaagggggagggccatgaaaaagttggctgtagatgccagggacactgggactctccagctgtgtgtttgtgtcttctgaagacttatgtttcattcctttggagcatgcataatcatacactgtgggatgtgttatatagattgcttgatagttcaccactgtaataaaatactgtgactggaatctgctcccagtctgcctttgatagcacttgtgcaacacacatttactgagcatttacagtgatccaggacctgtgttgtgaaaacattgatggacaaggcagatggtggagcacgtcagtgaggatttttaacaaaggctggtaagtgctataaaggaacattgtaggacactagagaacaaagaacaggagaacctgacttaggctggggtggggcgttggttagaggaggctccttggaggacatgaggtttaagctgtgacctgaggatgaatagatgttggccaggtgaggttaattaagcttgtcagccttaccagtaaaaaagaaaacctattaaaaaaaggcttaccagagaaagtacagcgggcacacaaaccacaagctctaaagtcactctccaacctctccacaatatatatacacaagccctaaactgacgtaatgggactaaagtgtaaaaaatcccgccaaacccaacacacaccccgaaactgcgtcaccagggaaaagtacagtttcacttccgcaatcccaacaagcgtcacttcctctttctcacggtacgtcacatcccattaacttacaacgtcattttcccacggccgcgccgccccttttaaccgttaaccccacagccaatcaccacacggcccacactttttaaaatcacctcatttacatattggcaccattccatctataaggtatattattgatgatgtttaaactacggcccggtacccagcttttgttccctttagtgagggttaattgcgcgcttggcgtaatcatggtcatagctgtttcctgtgtgaaattgttatccgctcacaattccacacaacatacgagccggaagcataaagtgtaaagcctggggtgcctaatgagtgagctaactcacattaattgcgttgcgctcactgcccgctttccagtcgggaaacctgtcgtgccagctgcattaatgaatcggccaacgcgcggggagaggcggtttgcgtattgggcgctcttccgcttcctcgctcactgactcgctgcgctcggtcgttcggctgcggcgagcggtatcagctcactcaaaggcggtaatacggttatccacagaatcaggggataacgcaggaaagaacatgtgagcaaaaggccagcaaaaggccaggaaccgtaaaaaggccgcgttgctggcgtttttccataggctccgcccccctgacgagcatcacaaaaatcgacgctcaagtcagaggtggcgaaacccgacaggactataaagataccaggcgtttccccctggaagctccctcgtgcgctctcctgttccgaccctgccgcttaccggatacctgtccgcctttctcccttcgggaagcgtggcgctttctcatagctcacgctgtaggtatctcagttcggtgtaggtcgttcgctccaagctgggctgtgtgcacgaaccccccgttcagcccgaccgctgcgccttatccggtaactatcgtcttgagtccaacccggtaagacacgacttatcgccactggcagcagccactggtaacaggattagcagagcgaggtatgtaggcggtgctacagagttcttgaagtggtggcctaactacggctacactagaaggacagtatttggtatctgcgctctgctgaagccagttaccttcggaaaaagagttggtagctcttgatccggcaaacaaaccaccgctggtagcggtggtttttttgtttgcaagcagcagattacgcgcagaaaaaaaggatctcaagaagatcctttgatcttttctacggggtctgacgctcagtggaacgaaaactcacgttaagggattttggtcatgagattatcaaaaaggatcttcacctagatccttttaaattaaaaatgaagttttaaatcaatctaaagtatatatgagtaaacttggtctgacagttaccaatgcttaatcagtgaggcacctatctcagcgatctgtctatttcgttcatccatagttgcctgactccccgtcgtgtagataactacgatacgggagggcttaccatctggccccagtgctgcaatgataccgcgagacccacgctcaccggctccagatttatcagcaataaaccagccagccggaagggccgagcgcagaagtggtcctgcaactttatccgcctccatccagtctattaattgttgccgggaagctagagtaagtagttcgccagttaatagtttgcgcaacgttgttgccattgctacaggcatcgtggtgtcacgctcgtcgtttggtatggcttcattcagctccggttcccaacgatcaaggcgagttacatgatcccccatgttgtgcaaaaaagcggttagctccttcggtcctccgatcgttgtcagaagtaagttggccgcagtgttatcactcatggttatggcagcactgcataattctcttactgtcatgccatccgtaagatgcttttctgtgactggtgagtactcaaccaagtcattctgagaatagtgtatgcggcgaccgagttgctcttgcccggcgtcaatacgggataataccgcgccacatagcagaactttaaaagtgctcatcattggaaaacgttcttcggggcgaaaactctcaaggatcttaccgctgttgagatccagttcgatgtaacccactcgtgcacccaactgatcttcagcatcttttactttcaccagcgtttctgggtgagcaaaaacaggaaggcaaaatgccgcaaaaaagggaataagggcgacacggaaatgttgaatactcatactcttcctttttcaatattattgaagcatttatcagggttattgtctcatgagcggatacatatttgaatgtatttagaaaaataaacaaataggggttccgcgcacatttccccgaaaagtgccacctgacgcgccctgtagcggcgcattaagcgcggcgggtgtggtggttacgcgcagcgtgaccgctacacttgccagcgccctagcgcccgctcctttcgctttcttcccttcctttctcgccacgttcgccggctttccccgtcaagctctaaatcgggggctccctttagggttccgatttagtgctttacggcacctcgaccccaaaaaacttgattagggtgatggttcacgtagtgggccatcgccctgatagacggtttttcgccctttgacgttggagtccacgttctttaatagtggactcttgttccaaactggaacaacactcaaccctatctcggtctattcttttgatttataagggattttgccgatttcggcctattggttaaaaaatgagctgatttaacaaaaatttaacgcgaattttaacaaaatattaacgcttacaatttccattcgccattcaggctgcgcaactgttgggaagggcgatcggtgcgggcctcttcgctattacgccagctggcgaaagggggatgtgctgcaaggcgattaagttgggtaacgccagggttttcccagtcacgacgttgtaaaacgacggccagtgagcgcgcgtaatacgactcactatagggcgaattggagctccactacgtagtttaaacatcatcaataatataccttatagatggaatggtgccaatatgtaaatgaggtgattttaaaaagtgtgggccgtgtggtgattggctgtggggttaacggttaaaaggggcggcgcggccgtgggaaaatgacgttttatgggggtggagtttttttgcaagttgtcgcgggaaatgttacgcataaaaaggcttcttttctcacggaactacttagttttcccacggtatttaacaggaaatgaggtagttttgaccggatgcaagtgaaaattgctgattttcgcgcgaaaactgaatgaggaagtgtttttctgaataatgtggtatttatggcagggtggagtatttgttcagggccaggtagactttgacccattacgtggaggtttcgattaccgtgttttttacctgaatttccgcgtaccgtgtcaaagtcttctgtttttacgtaggtgtcagctgatcgctagggtatttgattc

SEQ ID NO: 55 - DNA, 14414 bp, Artificial Sequence
  pWE15-A2
ccacgacgggcgttccttgcgcagctgtgctcgacgttgtcactgaagcgggaagggactggctgctattgggcgaagtgccggggcaggatctcctgtcatctcaccttgctcctgccgagaaagtatccatcatggctgatgcaatgcggcggctgcatacgcttgatccggctacctgcccattcgaccaccaagcgaaacatcgcatcgagcgagcacgtactcggatggaagccggtcttgtcgatcaggatgatctggacgaagagcatcaggggctcgcgccagccgaactgttcgccaggctcaaggcgcgcatgcccgacggcgaggatctcgtcgtgacccatggcgatgcctgcttgccgaatatcatggtggaaaatggccgcttttctggattcatcgactgtggccggctgggtgtggcggaccgctatcaggacatagcgttggctacccgtgatattgctgaagagcttggcggcgaatgggctgaccgcttcctcgtgctttacggtatcgccgctcccgattcgcagcgcatcgccttctatcgccttcttgacgagttcttctgagcgggactctggggttcgaaatgaccgaccaagcgacgcccaacctgccatcacgagatttcgattccaccgccgccttctatgaaaggttgggcttcggaatcgttttccgggacgccggctggatgatcctccagcgcggggatctcatgctggagttcttcgcccaccccgggctcgatcccctcgcgagttggttcagctgctgcctgaggctggacgacctcgcggagttctaccggcagtgcaaatccgtcggcatccaggaaaccagcagcggctatccgcgcatccatgcccccgaactgcaggagtggggaggcacgatggccgctttggtccggatctttgtgaaggaaccttacttctgtggtgtgacataattggacaaactacctacagagatttaaagctctaaggtaaatataaaatttttaagtgtataatgtgttaaactactgattctaattgtttgtgtattttagattccaacctatggaactgatgaatgggagcagtggtggaatgcctttaatgaggaaaacctgttttgctcagaagaaatgccatctagtgatgatgaggctactgctgactctcaacattctactcctccaaaaaagaagagaaaggtagaagaccccaaggactttccttcagaattgctaagttttttgagtcatgctgtgtttagtaatagaactcttgcttgctttgctatttacaccacaaaggaaaaagctgcactgctatacaagaaaattatggaaaaatattctgtaacctttataagtaggcataacagttataatcataacatactgttttttcttactccacacaggcatagagtgtctgctattaataactatgctcaaaaattgtgtacctttagctttttaatttgtaaaggggttaataaggaatatttgatgtatagtgccttgactagagatcataatcagccataccacatttgtagaggttttacttgctttaaaaaacctcccacacctccccctgaacctgaaacataaaatgaatgcaattgttgttgttaacttgtttattgcagcttataatggttacaaataaagcaatagcatcacaaatttcacaaataaagcatttttttcactgcattctagttgtggtttgtccaaactcatcaatgtatcttatcatgtctggatctgacgggtgcgcatgatcgtgctcctgtcgttgaggacccggctaggctggcggggttgccttactggttagcagaatgaatcaccgatacgcgagcgaacgtgaagcgactgctgctgcaaaacgtctgcgacctgagcaacaacatgaatggtcttcggtttccgtgtttcgtaaagtctggaaacgcggaagtcagcgctcttccgcttcctcgctcactgactcgctgcgctcggtcgttcggctgcggcgagcggtatcagctcactcaaaggcggtaatacggttatccacagaatcaggggataacgcaggaaagaacatgtgagcaaaaggccagcaaaaggccagcaaaaggccaggaaccgtaaaaaggccgcgttgctggcgtttttccataggctccgcccccctgacgagcatcacaaaaatcgacgctcaagtcagaggtggcgaaacccgacaggactataaagataccaggcgtttccccctggaagctccctcgtgcgctctcctgttccgaccctgccgcttaccggatacctgtccgcctttctcccttcgggaagcgtggcgctttctcatagctcacgctgtaggtatctcagttcggtgtaggtcgttcgctccaagctgggctgtgtgcacgaaccccccgttcagcccgaccgctgcgccttatccggtaactatcgtcttgagtccaacccggtaagacacgacttatcgccactggcagcagccactggtaacaggattagcagagcgaggtatgtaggcggtgctacagagttcttgaagtggtggcctaactacggctacactagaaggacagtatttggtatctgcgctctgctgaagccagttaccttcggaaaaagagttggtagctcttgatccggcaaacaaaccaccgctggtagcggtggtttttttgtttgcaagcagcagattacgcgcagaaaaaaaggatctcaagaagatcctttgatcttttctacggggtctgacgctcagtggaacgaaaactcacgttaagggattttggtcatgagattatcaaaaaggatcttcacctagatccttttaaattaaaaatgaagttttaaatcaatctaaagtatatatgagtaaacttggtctgacagttaccaatgcttaatcagtgaggcacctatctcagcgatctgtctatttcgttcatccatagttgcctgactccccgtcgtgtagataactacgatacgggagggcttaccatctggccccagtgctgcaatgataccgcgagacccacgctcaccggctccagatttatcagcaataaaccagccagccggaagggccgagcgcagaagtggtcctgcaactttatccgcctccatccagtctattaattgttgccgggaagctagagtaagtagttcgccagttaatagtttgcgcaacgttgttgccattgctgcaggcatcgtggtgtcacgctcgtcgtttggtatggcttcattcagctccggttcccaacgatcaaggcgagttacatgatcccccatgttgtgcaaaaaagcggttagctccttcggtcctccgatcgttgtcagaagtaagttggccgcagtgttatcactcatggttatggcagcactgcataattctcttactgtcatgccatccgtaagatgcttttctgtgactggtgagtactcaaccaagtcattctgagaatagtgtatgcggcgaccgagttgctcttgcccggcgtcaacacgggataataccgcgccacatagcagaactttaaaagtgctcatcattggaaaacgttcttcggggcgaaaactctcaaggatcttaccgctgttgagatccagttcgatgtaacccactcgtgcacccaactgatcttcagcatcttttactttcaccagcgtttctgggtgagcaaaaacaggaaggcaaaatgccgcaaaaaagggaataagggcgacacggaaatgttgaatactcatactcttcctttttcaatattattgaagcatttatcagggttattgtctcatgagcggatacatatttgaatgtatttagaaaaataaacaaataggggttccgcgcacatttccccgaaaagtgccacctgacgtctaagaaaccattattatcatgacattaacctataaaaataggcgtatcacgaggccctttcgtcttcaagaattcggccggccgtttaaacatctagatggtacctcatgtttgaccgcttatcatcgcgataagctttaatgcggtagtttatcacagttaaattgctaacgcagtcaggcaccgtgtatgaaatctaacaatgcgctcatcgtcatcctcggcaccgtcaccctggatgctgtaggcataggcttggttatgccggtactgccgggcctcttgcgggatatcgtccattccgacagcatcgccagtcactatggcgtgctactagcgctatatgcgttgatgcaatttctatgcgcacccgttctcggagcactgtccgaccgctttggccgccgcccagtcctgctcgcttcgctacttggagccactatcgactacgcgatcatggcgaccacacccgtcctgtggatctgcctcgctggcctgccgcagttcttcaacctcccggcgcagcttttcgttctcaatttcagcatccctttcggcataccattttatgacggcggcagagtcataaagcacctcattacccttgccaccgcctcgcagaacgggcattccctgttcctgccagttctgaatggtacggatactcgcaccgaaaatgtcagccagctgctttttgttgacttccattgttcattccacggacaaaaacagagaaaggaaacgacagaggccaaaaagctcgctttcagcacctgtcgtttcctttcttttcagagggtattttaaataaaaacattaagttatgacgaagaagaacggaaacgccttaaaccggaaaattttcataaatagcgaaaacccgcgaggtcgccgccccgtaacaaggcggatcgccggaaaggacccgcaaatgataataattatcaattgcatactatcgacggcactgctgccagataacaccaccggggaaacattccatcatgatggccgtgcggacataggaagccagttcatccatcgctttcttgtctgctgccatttgctttgtgacatccagcgccgcacattcagcagcgtttttcagcgcgttttcgatcaacgtttcaatgttggtatcaacaccaggtttaactttgaacttatcggcactgacggttaccttgttctgcgctggctcatcacgctggataccaaggctgatgttgtagatattggtcaccggctgaggtgtttcgattgccgctgcgtggatagcaccatttgcgatagcggcgtccttgatgaatgacactccattgcgaataagttcgaaggagacggtgtcacgaatgcgctggtccagctcgtcgattgccttttgtgcagcagaggtatcaatctcaacgccaagcgtcatcgaagcgcaatattgctgctcaccaaaacgcgtattgaccaggtgttcaacggcaaatttctgcccttctgatgtcagaaaggtaaagtgattttctttctggtattcagttgctgtgtgtctggtttcagcaaaaccaagctcgcgcaattcggctgtgccagatttagaaggcagatcaccagacagcaacgcgccacggaaaaacagcgcatacagaacatccgtcgccgcgccggacaacgtgataattttatgacccatgatttatttccttttagacgtgagcctgtcgcacagcaaagccgccgaaagttaacggtttgcccaggctcacaactgaaagactttctacggtgtgcgcgtgcgatgcgcgtagaagactgatttatcaacctgtctttatatcaggattcattacctgactatttgtgggtaaagttcgtagtgcgctgatcgtgcaaaatgattttagttgggaacagttcgcaactctgtcccataaaaatcagcatattcccatctatcccatatccagcgcattgaccatcgggatactgaagggagattccatcatctcttagaaagatcaccatctcttttgtttcaatttgcatatagctacctggaggatttatgaatacaaggattttcatggactattaccatgagattgattttccatctttattcgcgagagcagtggaaagcgatgacgatgtgggtactacattgcgcattcacctactttgtgagcgcatggtcgaagcatggatatgcgcatgctgtgactgccaagatcctctacgccggacgcatcgtggccggcatcaccggcgccacaggtgcggttgctggcgcctatatcgccgacatcaccgatggggaagatcgggctcgccacttcgggctcatgagcgcttgtttcggcgtgggtatggtggcaggccccgtggccgggggactgttgggcgccatctccttgcatgcaccattccttgcggcggcggtgctcaacggcctcaacctactactgggctgcttcctaatgcaggagtcgcataagggagagcgtcgaccgatgcccttgagagccttcaacccagtcagctccttccggtgggcgcggggcatgactatcgtcgccgcacttatgactgtcttctttatcatgcaactcgtaggacaggtgccggcagcgctctgggtcattttcggcgaggaccgctttcgctggagcgcgacgatgatcggcctgtcgcttgcggtattcggaatcttgcacgccctcgctcaagccttcgtcactggtcccgccaccaaacgtttcggcgagaagcaggccattatcgccggcatggcggccgacgcgctgggctacgtcttgctggcgttcgcgacgcgaggctggatggccttccccattatgattcttctcgcttccggcggcatcgggatgcccgcgttgcaggccatgctgtccaggcaggtagatgacgaccatcagggacagcttcaaggatcgctcgcggctcttaccagcctaacttcgatcattggaccgctgatcgtcacggcgatttatgccgcctcggcgagcacatggaacgggttggcatggattgtaggcgccgccctataccttgtctgcctccccgcgttgcgtcgcggtgcatggagccgggccacctcgacctgaatggaagccggcggcacctcgctaacggattcaccactccaagaattggagccaatcaattcttgcggagaactgtgaatgcgcaaaccaacccttggcagaacatatccatcgcgtccgccatctccagcagccgcacgcggcgcatctcgggcagcgttgggtcctgcagatccggctgtggaatgtgtgtcagttagggtgtggaaagtccccaggctccccagcaggcagaagtatgcaaagcatgcatctcaattagtcagcaaccaggtgtggaaagtccccaggctccccagcaggcagaagtatgcaaagcatgcatctcaattagtcagcaaccatagtcccgcccctaactccgcccatcccgcccctaactccgcccagttccgcccattctccgccccatggctgactaattttttttatttatgcagaggccgaggccgcctcggcctctgagctattccagaagtagtgaggaggcttttttggaggcctaggcttttgcaaaaagcttcacgctgccgcaagcactcagggcgcaagggctgctaaaggaagcggaacacgtagaaagccagtccgcagaaacggtgctgaccccggatgaatgtcagctactgggctatctggacaagggaaaacgcaagcgcaaagagaaagcaggtagcttgcagtgggcttacatggcgatagctagactgggcggttttatggacagcaagcgaaccggaattgccagctggggcgccctctggtaaggttgggaagccctgcaaagtaaactggatggctttcttgccgccaaggatctgatggcgcaggggatcaagatctgatcaagagacaggatgaggatcgtttcgcatgattgaacaagatggattgcacgcaggttctccggccgcttgggtggagaggctattcggctatgactgggcacaacagacaatcggctgctctgatgccgccgtgttccggctgtcagcgcaggggcgcccggttctttttgtcaagaccgacctgtccggtgccctgaatgaactgcaggacgaggcagcgcggctatcgtggctggccaattgcaagccatcaacaaagcccgccaagagtttctgctacgaaagggacggggggtttacttggacccccagtccggcgaggagctcaacccaatccccccgccgccgcagccctatcagcagcagccgcgggcccttgcttcccaggatggcacccaaaaagaagctgcagctgccgccgccacccacggacgaggaggaatactgggacagtcaggcagaggaggttttggacgaggaggaggaggacatgatggaagactgggagagcctagacgaggaagcttccgaggtcgaagaggtgtcagacgaaacaccgtcaccctcggtcgcattcccctcgccggcgccccagaaatcggcaaccggttccagcatggctacaacctccgctcctcaggcgccgccggcactgcccgttcgccgacccaaccgtagatgggacaccactggaaccagggccggtaagtccaagcagccgccgccgttagcccaagagcaacaacagcgccaaggctaccgctcatggcgcgggcacaagaacgccatagttgcttgcttgcaagactgtgggggcaacatctccttcgcccgccgctttcttctctaccatcacggcgtggccttcccccgtaacatcctgcattactaccgtcatctctacagcccatactgcaccggcggcagcggcagcggcagcaacagcagcggccacacagaagcaaaggcgaccggatagcaagactctgacaaagcccaagaaatccacagcggcggcagcagcaggaggaggagcgctgcgtctggcgcccaacgaacccgtatcgacccgcgagcttagaaacaggatttttcccactctgtatgctatatttcaacagagcaggggccaagaacaagagctgaaaataaaaaacaggtctctgcgatccctcacccgcagctgcctgtatcacaaaagcgaagatcagcttcggcgcacgctggaagacgcggaggctctcttcagtaaatactgcgcgctgactcttaaggactagtttcgcgccctttctcaaatttaagcgcgaaaactacgtcatctccagcggccacacccggcgccagcacctgtcgtcagcgccattatgagcaaggaaattcccacgccctacatgtggagttaccagccacaaatgggacttgcggctggagctgcccaagactactcaacccgaataaactacatgagcgcgggaccccacatgatatcccgggtcaacggaatccgcgcccaccgaaaccgaattctcttggaacaggcggctattaccaccacacctcgtaataaccttaatccccgtagttggcccgctgccctggtgtaccaggaaagtcccgctcccaccactgtggtacttcccagagacgcccaggccgaagttcagatgactaactcaggggcgcagcttgcgggcggctttcgtcacagggtgcggtcgcccgggcagggtataactcacctgacaatcagagggcgaggtattcagctcaacgacgagtcggtgagctcctcgcttggtctccgtccggacgggacatttcagatcggcggcgccggccgtccttcattcacgcctcgtcaggcaatcctaactctgcagacctcgtcctctgagccgcgctctggaggcattggaactctgcaatttattgaggagtttgtgccatcggtctactttaaccccttctcgggacctcccggccactatccggatcaatttattcctaactttgacgcggtaaaggactcggcggacggctacgactgaatgttaagtggagaggcagagcaactgcgcctgaaacacctggtccactgtcgccgccacaagtgctttgcccgcgactccggtgagttttgctactttgaattgcccgaggatcatatcgagggcccggcgcacggcgtccggcttaccgcccagggagagcttgcccgtagcctgattcgggagtttacccagcgccccctgctagttgagcgggacaggggaccctgtgttctcactgtgatttgcaactgtcctaaccctggattacatcaagatcctctagttaatggatccaatcgatatcgcgaagtcgatcgacggatcgggagatctcccgatcccctatggtgcactctcagtacaatctgctctgatgccgcatagttaagccagtatctgctccctgcttgtgtgttggaggtcgctgagtagtgcgcgagcaaaatttaagctacaacaaggcaaggcttgaccgacaattgcatgaagaatctgcttagggttaggcgttttgcgctgcttcgcgatgtacgggccagatatacgcgttgacattgattattgactagttattaatagtaatcaattacggggtcattagttcatagcccatatatggagttccgcgttacataacttacggtaaatggcccgcctggctgaccgcccaacgacccccgcccattgacgtcaataatgacgtatgttcccatagtaacgccaatagggactttccattgacgtcaatgggtggagtatttacggtaaactgcccacttggcagtacatcaagtgtatcatatgccaagtacgccccctattgacgtcaatgacggtaaatggcccgcctggcattatgcccagtacatgaccttatgggactttcctacttggcagtacatctacgtattagtcatcgctattaccatggtgatgcggttttggcagtacatcaatgggcgtggatagcggtttgactcacggggatttccaagtctccaccccattgacgtcaatgggagtttgttttggcaccaaaatcaacgggactttccaaaatgtcgtaacaactccgccccattgacgcaaatgggcggtaggcgtgtacggtgggaggtctatataagcagagctctctggctaactagagaacccactgcttactggcttatcgaaattaatacgactcactatagggagacccaagctggctagcgtttaaacttaagcttcgagctcggatccaccggtcgccaccatggtgagcaagggcgaggagctgttcaccggggtggtgcccatcctggtcgagctggacggcgacgtaaacggccacaagttcagcgtgtccggcgagggcgagggcgatgccacctacggcaagctgaccctgaagttcatctgcaccaccggcaagctgcccgtgccctggcccaccctcgtgaccaccctgacctacggcgtgcagtgcttcagccgctaccccgaccacatgaagcagcacgacttcttcaagtccgccatgcccgaaggctacgtccaggagcgcaccatcttcttcaaggacgacggcaactacaagacccgcgccgaggtgaagttcgagggcgacaccctggtgaaccgcatcgagctgaagggcatcgacttcaaggaggacggcaacatcctggggcacaagctggagtacaactacaacagccacaacgtctatatcatggccgacaagcagaagaacggcatcaaggtgaacttcaagatccgccacaacatcgaggacggcagcgtgcagctcgccgaccactaccagcagaacacccccatcggcgacggccccgtgctgctgcccgacaaccactacctgagcacccagtccgccctgagcaaagaccccaacgagaagcgcgatcacatggtcctgctggagttcgtgaccgccgccgggatcactctcggcatggacgagctgtacaagtaaagcggccgctcgagtctagagggcccgtttaaacccgctgatcagcctcgactgtgccttctagttgccagccatctgttgtttgcccctcccccgtgccttccttgaccctggaaggtgccactcccactgtcctttcctaataaaatgaggaaattgcatcgcattgtctgagtaggtgtcattctattctggggggtggggtggggcaggacagcaagggggaggattgggaagacaatagcaggcatgctggggatgcggtgggctctatggcttctgaggcggaaagaaccagctggggctctagggggtatccccacgcgccctgtagcggcgcattaagcgcggcgggtgtggtggttacgcgcagcgtgaccgctacacttgccagcgccctagcgcccgctcctttcgctttcttcccttcctttctcgccacgttcgccggctttccccgtcaagctctaaatcgggggctccctttagggttccgatttagtgctttacggcacctcgaccccaaaaaacttgattagggtgatggttcacatcgaattcctgcagcccgggggatccattaactaataaaaaaaaataataaagcatcacttacttaaaatcagttagcaaatttctgtccagtttattcagcagcacctccttgccctcctcccagctctggtattgcagcttcctcctggctgcaaactttctccacaatctaaatggaatgtcagtttcctcctgttcctgtccatccgcacccactatcttcatgttgttgcagatgaagcgcgcaagaccgtctgaagataccttcaaccccgtgtatccatatgacacggaaaccggtcctccaactgtgccttttcttactcctccctttgtatcccccaatgggtttcaagagagtccccctggagttcttactttaaaatgtttaaccccactaacaaccacaggcggatctctacagctaaaagtgggagggggacttacagtggatgacactgatggtaccttacaagaaaacatacgtgctacagcacccattactaaaaataatcactctgtagaactatccattggaaatggattagaaactcaaaacaataaactatgtgccaaattgggaaatgggttaaaatttaacaacggtgacatttgtataaaggatagtattaacaccttatggactggaataaaccctccacctaactgtcaaattgtggaaaacactaatacaaatgatggcaaacttactttagtattagtaaaaaacggagggcttgttaatggctacgtgtctctagttggtgtatcagacactgtgaaccaaatgttcacacaaaagacagcaaacatccaattaagattatattttgactcttctggaaatctattaactggagaatcagacttaaaaattccacttaaaaataaatcttctacagcgaccagtgaaactgtagccagcagcaaagcctttatgccaagtactacagcttatcccttcaacaccgctactagggatagtgaaaactacattcatggaatatgttactacatgactagttatgatagaagtctatttcccttgaacatttctataatgctaaacagccgtatgatttcttccaatgttgcctatgccatacaatttgaatggaatctaaatgcaagtgaatctccagaaagcaacatagctacgctgaccacatccccctttttcttttcttacattacagaagacgacaactaaaatgcccaagaataaagaaagctttgtgttatgtttcaacgtgtttatttttcaattgcagaaaatttcaagtcatttttcattcagtagtatagccccaccaccacatagcttatacagatcaccgtaccttaatcaaactcacagaaccctagtattcaacctgccacctccctcccaacacacagagtacacagtcctttctccccggctggccttaaaaagcatcatatcatgggtaacagacatattcttaggtgttatattccacacggtttcctgtcgagccaaacgctcatcagtgatattaataaactccccgggcagctcacttaagttcatgtcgctgtccagctgctgagccacaggctgctgtccaacttgcggttgcttaacgggcggcgaaggagaagtccacgcctacatgggggtagagtcataatcgtgcatcaggatagggcggtggtgctgcagcagcgcgcgaataaactgctgccgccgccgctccgtcctgcaggaatacaacatggcagtggtctcctcagcgatgattcgcaccgcccgcagcataaggcgccttgtcctccgggcacagcagcgcaccctgatctcacttaaatcagcacagtaactgcagcacagcaccacaatattgttcaaaatcccacagtgcaaggcgctgtatccaaagctcatggcggggaccacagaacccacgtgg

SEQ ID NO: 56 - DNA, 34834 bp, Artificial Sequence
  PS1
catcatcaataatataccttatagatggaatggtgccaatatgtaaatgaggtgattttaaaaagtgtgggccgtgtggtgattggctgtggggttaacggttaaaaggggcggcgcggccgtgggaaaatgacgttttatgggggtggagtttttttgcaagttgtcgcgggaaatgataacttcgtatagcatacattatacgaagttatttacgcataaaaaggcttcttttctcacggaactacttagttttcccacggtatttaacaggaaatgaggtagttttgaccggatgcaagtgaaaattgctgattttcgcgcgaaaactgaatgaggaagtgtttttctgaataatgtggtatttatggcagggtgataacttcgtatagcatacattatacgaagttatggaatgtttatgccttaccagtgtaacatgaatcatgtgaaagtgttgttggaaccagatgccttttccagaatgagcctaacaggaatctttgacatgaacacgcaaatctggaagatcctgaggtatgatgatacgagatcgagggtgcgcgcatgcgaatgcggaggcaagcatgccaggttccagccggtgtgtgtagatgtgaccgaagatctcagaccggatcatttggttattgcccgcactggagcagagttcggatccagtggagaagaaactgactaaggtgagtattgggaaaactttggggtgggattttcagatggacagattgagtaaaaatttgttttttctgtcttgcagctgacatgagtggaaatgcttcttttaaggggggagtcttcagcccttatctgacagggcgtctcccatcctgggcaggagttcgtcagaatgttatgggatctactgtggatggaagacccgttcaacccgccaattcttcaacgctgacctatgctactttaagttcttcacctttggacgcagctgcagccgctgccgccgcctctgtcgccgctaacactgtgcttggaatgggttactatggaagcatcgtggctaattccacttcctctaataacccttctacactgactcaggacaagttacttgtccttttggcccagctggaggctttgacccaacgtctgggtgaactttctcagcaggtggccgagttgcgagtacaaactgagtctgctgtcggcacggcaaagtctaaataaaaaaaattccagaatcaatgaataaataaacgagcttgttgttgatttaaaatcaagtgtttttatttcatttttcgcgcacggtatgccctggaccaccgatctcgatcattgagaactcggtggattttttccagaatcctatagaggtgggattgaatgtttagatacatgggcattaggccgtctttggggtggagatagctccattgaagggattcatgctccggggtagtgttgtaaatcacccagtcataacaaggtcgcagtgcatggtgttgcacaatatcttttagaagtaggctgattgccacagataagcccttggtgtaggtgtttacaaaccggttgagctgggaggggtgcattcgaggtgaaattatgtgcattttggattggatttttaagttggcaatattgccgccaagatcccgtcttgggttcatgttatgaaggactaccaagacggtgtatccggtacatttaggaaatttatcgtgcagcttggatggaaaagcgtggaaaaatttggagacacccttgtgtcctccgagattttccatgcactcatccatgataatagcaatggggccgtgggcagcggcgcgggcaaacacgttccgtgggtctgacacatcatagttatgttcctgagttaaatcatcataagccattttaatgaatttggggcggagcgtaccagattggggtatgaatgttccttcgggccccggagcatagttcccctcacagatttgcatttcccaagctttcagttctgagggtggaatcatgtccacctggggggctatgaagaacaccgtttcgggggcgggggtgattagttgggatgatagcaagtttctgagcaattgagatttgccacatccggtggggccataaataattccgattacaggttgcaggtggtagtttagggaacggcaactgccgtcttctcgaagcaagggggccacctcgttcatcatttcccttacatgcatattttcccgcaccaaatccattaggaggcgctctcctcctagtgatagaagttcttgtagtgaggaaaagtttttcagcggttttagaccgtcagccatgggcattttggaaagagtttgctgcaaaagttctagtctgttccacagttcagtgatgtgttctatggcatctcgatccagcagacctcctcgtttcgcgggtttggacggctcctggagtagggtatgagacgatgggcgtccagcgctgccagggttcggtccttccagggtctcagtgttcgagtcagggttgtttccgtcacagtgaaggggtgtgcgcctgcttgggcgcttgccagggtgcgcttcagactcattctgctggtggagaacttctgtcgcttggcgccctgtatgtcggccaagtagcagtttaccatgagttcgtagttgagcgcctcggctgcgtggcctttggcgcggagcttacctttggaagttttcttgcataccgggcagtataggcatttcagcgcatacagcttgggcgcaaggaaaatggattctggggagtatgcatccgcgccgcaggaggcgcaaacagtttcacattccaccagccaggttaaatccggttcattggggtcaaaaacaagttttccgccatattttttgatgcgtttcttacctttggtctccataagttcgtgtcctcgttgagtgacaaacaggctgtccgtatctccgtagactgattttacaggcctcttctccagtggagtgcctcggtcttcttcgtacaggaactctgaccactctgatacaaaggcgcgcgtccaggccagcacaaaggaggctatgtgggaggggtagcgatcgttgtcaaccagggggtccaccttttccaaagtatgcaaacacatgtcaccctcttcaacatccaggaatgtgattggcttgtaggtgtatttcacgtgacctggggtccccgctgggggggtataaaagggggcggttctttgctcttcctcactgtcttccggatcgctgtccaggaacgtcagctgttggggtaggtattccctctcgaaggcgggcatgacctctgcactcaggttgtcagtttctaagaacgaggaggatttgatattgacagtgccggttgagatgcctttcatgaggttttcgtccatttggtcagaaaacacaatttttttattgtcaagtttggtggcaaatgatccatacagggcgttggataaaagtttggcaatggatcgcatggtttggttcttttccttgtccgcgcgctctttggcggcgatgttgagttggacatactcgcgtgccaggcacttccattcggggaagatagttgttaattcatctggcacgattctcacttgccaccctcgattatgcaaggtaattaaatccacactggtggccacctcgcctcgaaggggttcattggtccaacagagcctacctcctttcctagaacagaaagggggaagtgggtctagcataagttcatcgggagggtctgcatccatggtaaagattcccggaagtaaatccttatcaaaatagctgatgggagtggggtcatctaaggccatttgccattctcgagctgccagtgcgcgctcatatgggttaaggggactgccccagggcatgggatgggtgagagcagaggcatacatgccacagatgtcatagacgtagatgggatcctcaaagatgcctatgtaggttggatagcatcgcccccctctgatacttgctcgcacatagtcatatagttcatgtgatggcgctagcagccccggacccaagttggtgcgattgggtttttctgttctgtagacgatctggcgaaagatggcgtgagaattggaagagatggtgggtctttgaaaaatgttgaaatgggcatgaggtagacctacagagtctctgacaaagtgggcataagattcttgaagcttggttaccagttcggcggtgacaagtacgtctagggcgcagtagtcaagtgtttcttgaatgatgtcataacctggttggtttttcttttcccacagttcgcggttgagaaggtattcttcgcgatccttccagtactcttctagcggaaacccgtctttgtctgcacggtaagatcctagcatgtagaactgattaactgccttgtaagggcagcagcccttctctacgggtagagagtatgcttgagcagcttttcgtagcgaagcgtgagtaagggcaaaggtgtctctgaccatgactttgagaaattggtatttgaagtccatgtcgtcacaggctccctgttcccagagttggaagtctacccgtttcttgtaggcggggttgggcaaagcgaaagtaacatcattgaagagaatcttaccggctctgggcataaaattgcgagtgatgcggaaaggctgtggtacttccgctcgattgttgatcacctgggcagctaggacgatttcgtcgaaaccgttgatgttgtgtcctacgatgtataattctatgaaacgcggcgtgcctctgacgtgaggtagcttactgagctcatcaaaggttaggtctgtggggtcagataaggcgtagtgttcgagagcccattcgtgcaggtgaggatttgcatgtaggaatgatgaccaaagatctaccgccagtgctgtttgtaactggtcccgatactgacgaaaatgccggccaattgccattttttctggagtgacacagtagaaggttctggggtcttgttgccatcgatcccacttgagtttaatggctagatcgtgggccatgttgacgagacgctcttctcctgagagtttcatgaccagcatgaaaggaactagttgtttgccaaaggatcccatccaggtgtaagtttccacatcgtaggtcaggaagagtctttctgtgcgaggatgagagccgatcgggaagaactggatttcctgccaccagttggaggattggctgttgatgtgatggaagtagaagtttctgcggcgcgccgagcattcgtgtttgtgcttgtacagacggccgcagtagtcgcagcgttgcacgggttgtatctcgtgaatgagctgtacctggcttcccttgacgagaaatttcagtgggaagccgaggcctggcgattgtatctcgtgctcttctatattcgctgtatcggcctgttcatcttctgtttcgatggtggtcatgctgacgagcccccgcgggaggcaagtccagacctcggcgcgggaggggcggagctgaaggacgagagcgcgcaggctggagctgtccagagtcctgagacgctgcggactcaggttagtaggtagggacagaagattaacttgcatgatcttttccagggcgtgcgggaggttcagatggtacttgatttccacaggttcgtttgtagagacgtcaatggcttgcagggttccgtgtcctttgggcgccactaccgtacctttgttttttcttttgatcggtggtggctctcttgcttcttgcatgctcagaagcggtgacggggacgcgcgccgggcggcagcggttgttccggacccgggggcatggctggtagtggcacgtcggcgccgcgcacgggcaggttctggtattgcgctctgagaagacttgcgtgcgccaccacgcgtcgattgacgtcttgtatctgacgtctctgggtgaaagctaccggccccgtgagcttgaacctgaaagagagttcaacagaatcaatttcggtatcgttaacggcagcttgtctcagtatttcttgtacgtcaccagagttgtcctggtaggcgatctccgccatgaactgctcgatttcttcctcctgaagatctccgcgacccgctctttcgacggtggccgcgaggtcattggagatacggcccatgagttgggagaatgcattcatgcccgcctcgttccagacgcggctgtaaaccacggccccctcggagtctcttgcgcgcatcaccacctgagcgaggttaagctccacgtgtctggtgaagaccgcatagttgcataggcgctgaaaaaggtagttgagtgtggtggcaatgtgttcggcgacgaagaaatacatgatccatcgtctcagcggcatttcgctaacatcgcccagagcttccaagcgctccatggcctcgtagaagtccacggcaaaattaaaaaactgggagtttcgcgcggacacggtcaattcctcctcgagaagacggatgagttcggctatggtggcccgtacttcgcgttcgaaggctcccgggatctcttcttcctcttctatctcttcttccactaacatctcttcttcgtcttcaggcgggggcggagggggcacgcggcgacgtcgacggcgcacgggcaaacggtcgatgaatcgttcaatgacctctccgcggcggcggcgcatggtttcagtgacggcgcggccgttctcgcgcggtcgcagagtaaaaacaccgccgcgcatctccttaaagtggtgactgggaggttctccgtttgggagggagagggcgctgattatacattttattaattggcccgtagggactgcgcgcagagatctgatcgtgtcaagatccacgggatctgaaaacctttcgacgaaagcgtctaaccagtcacagtcacaaggtaggctgagtacggcttcttgtgggcgggggtggttatgtgttcggtctgggtcttctgtttcttcttcatctcgggaaggtgagacgatgctgctggtgatgaaattaaagtaggcagttctaagacggcggatggtggcgaggagcaccaggtctttgggtccggcttgctggatacgcaggcgattggccattccccaagcattatcctgacatctagcaagatctttgtagtagtcttgcatgagccgttctacgggcacttcttcctcacccgttctgccatgcatacgtgtgagtccaaatccgcgcattggttgtaccagtgccaagtcagctacgactctttcggcgaggatggcttgctgtacttgggtaagggtggcttgaaagtcatcaaaatccacaaagcggtggtaagcccctgtattaatggtgtaagcacagttggccatgactgaccagttaactgtctggtgaccagggcgcacgagctcggtgtatttaaggcgcgaataggcgcgggtgtcaaagatgtaatcgttgcaggtgcgcaccagatactggtaccctataagaaaatgcggcggtggttggcggtagagaggccatcgttctgtagctggagcgccaggggcgaggtcttccaacataaggcggtgatagccgtagatgtacctggacatccaggtgattcctgcggcggtagtagaagcccgaggaaactcgcgtacgcggttccaaatgttgcgtagcggcatgaagtagttcattgtaggcacggtttgaccagtgaggcgcgcgcagtcattgatgctctatagacacggagaaaatgaaagcgttcagcgactcgactccgtagcctggaggaacgtgaacgggttgggtcgcggtgtaccccggttcgagacttgtactcgagccggccggagccgcggctaacgtggtattggcactcccgtctcgacccagcctacaaaaatccaggatacggaatcgagtcgttttgctggtttccgaatggcagggaagtgagtcctattttttttttttttgccgctcagatgcatcccgtgctgcgacagatgcgcccccaacaacagcccccctcgcagcagcagcagcagcaaccacaaaaggctgtccctgcaactactgcaactgccgccgtgagcggtgcgggacagcccgcctatgatctggacttggaagagggcgaaggactggcacgtctaggtgcgccttcgcccgagcggcatccgcgagttcaactgaaaaaagattctcgcgaggcgtatgtgccccaacagaacctatttagagacagaagcggcgaggagccggaggagatgcgagcttcccgctttaacgcgggtcgtgagctgcgtcacggtttggaccgaagacgagtgttgcgagacgaggatttcgaagttgatgaagtgacagggatcagtcctgccagggcacacgtggctgcagccaaccttgtatcggcttacgagcagacagtaaaggaagagcgtaacttccaaaagtcttttaataatcatgtgcgaaccctgattgcccgcgaagaagttacccttggtttgatgcatttgtgggatttgatggaagctatcattcagaaccctactagcaaacctctgaccgcccagctgtttctggtggtgcaacacagcagagacaatgaggctttcagagaggcgctgctgaacatcaccgaacccgaggggagatggttgtatgatcttatcaacattctacagagtatcatagtgcaggagcggagcctgggcctggccgagaaggtagctgccatcaattactcggttttgagcttgggaaaatattacgctcgcaaaatctacaagactccatacgttcccatagacaaggaggtgaagatagatgggttctacatgcgcatgacgctcaaggtcttgaccctgagcgatgatcttggggtgtatcgcaatgacagaatgcatcgcgcggttagcgccagcaggaggcgcgagttaagcgacagggaactgatgcacagtttgcaaagagctctgactggagctggaaccgagggtgagaattacttcgacatgggagctgacttgcagtggcagcctagtcgcagggctctgagcgccgcgacggcaggatgtgagcttccttacatagaagaggcggatgaaggcgaggaggaagagggcgagtacttggaagactgatggcacaacccgtgttttttgctagatggaacagcaagcaccggatcccgcaatgcgggcggcgctgcagagccagccgtccggcattaactcctcggacgattggacccaggccatgcaacgtatcatggcgttgacgactcgcaaccccgaagcctttagacagcaaccccaggccaaccgtctatcggccatcatggaagctgtagtgccttcccgatctaatcccactcatgagaaggtcctggccatcgtgaacgcgttggtggagaacaaagctattcgtccagatgaggccggactggtatacaacgctctcttagaacgcgtggctcgctacaacagtagcaatgtgcaaaccaatttggaccgtatgataacagatgtacgcgaagccgtgtctcagcgcgaaaggttccagcgtgatgccaacctgggttcgctggtggcgttaaatgctttcttgagtactcagcctgctaatgtgccgcgtggtcaacaggattatactaactttttaagtgctttgagactgatggtatcagaagtacctcagagcgaagtgtatcagtccggtcctgattacttctttcagactagcagacagggcttgcagacggtaaatctgagccaagcttttaaaaaccttaaaggtttgtggggagtgcatgccccggtaggagaaagagcaaccgtgtctagcttgttaactccgaactcccgcctgttattactgttggtagctcctttcaccgacagcggtagcatcgaccgtaattcctatttgggttacctactaaacctgtatcgcgaagccatagggcaaagtcaggtggacgagcagacctatcaagaaattacccaagtcagtcgcgctttgggacaggaagacactggcagtttggaagccactctgaacttcttgcttaccaatcggtctcaaaagatccctcctcaatatgctcttactgcggaggaggagaggatccttagatatgtgcagcagagcgtgggattgtttctgatgcaagagggggcaactccgactgcagcactggacatgacagcgcgaaatatggagcccagcatgtatgccagtaaccgacctttcattaacaaactgctggactacttgcacagagctgccgctatgaactctgattatttcaccaatgccatcttaaacccgcactggctgcccccacctggtttctacacgggcgaatatgacatgcccgaccctaatgacggatttctgtgggacgacgtggacagcgatgttttttcacctctttctgatcatcgcacgtggaaaaaggaaggcggtgatagaatgcattcttctgcatcgctgtccggggtcatgggtgctaccgcggctgagcccgagtctgcaagtccttttcctagtctacccttttctctacacagtgtacgtagcagcgaagtgggtagaataagtcgcccgagtttaatgggcgaagaggagtacctaaacgattccttgctcagaccggcaagagaaaaaaatttcccaaacaatggaatagaaagtttggtggataaaatgagtagatggaagacttatgctcaggatcacagagacgagcctgggatcatggggactacaagtagagcgagccgtagacgccagcgccatgacagacagaggggtcttgtgtgggacgatgaggattcggccgatgatagcagcgtgttggacttgggtgggagaggaaggggcaacccgtttgctcatttgcgccctcgcttgggtggtatgttgtgaaaaaaaataaaaaagaaaaactcaccaaggccatggcgacgagcgtacgttcgttcttctttattatctgtgtctagtataatgaggcgagtcgtgctaggcggagcggtggtgtatccggagggtcctcctccttcgtacgagagcgtgatgcagcagcagcaggcgacggcggtgatgcaatccccactggaggctccctttgtgcctccgcgatacctggcacctacggagggcagaaacagcattcgttactcggaactggcacctcagtacgataccaccaggttgtatctggtggacaacaagtcggcggacattgcttctctgaactatcagaatgaccacagcaacttcttgaccacggtggtgcagaacaatgactttacccctacggaagccagcacccagaccattaactttgatgaacgatcgcggtggggcggtcagctaaagaccatcatgcatactaacatgccaaacgtgaacgagtatatgtttagtaacaagttcaaagcgcgtgtgatggtgtccagaaaacctcccgacggtgctgcagttggggatacttatgatcacaagcaggatattttggaatatgagtggttcgagtttactttgccagaaggcaacttttcagttactatgactattgatttgatgaacaatgccatcatagataattacttgaaagtgggtagacagaatggagtgcttgaaagtgacattggtgttaagttcgacaccaggaacttcaagctgggatgggatcccgaaaccaagttgatcatgcctggagtgtatacgtatgaagccttccatcctgacattgtcttactgcctggctgcggagtggattttaccgagagtcgtttgagcaaccttcttggtatcagaaaaaaacagccatttcaagagggttttaagattttgtatgaagatttagaaggtggtaatattccggccctcttggatgtagatgcctatgagaacagtaagaaagaacaaaaagccaaaatagaagctgctacagctgctgcagaagctaaggcaaacatagttgccagcgactctacaagggttgctaacgctggagaggtcagaggagacaattttgcgccaacacctgttccgactgcagaatcattattggccgatgtgtctgaaggaacggacgtgaaactcactattcaacctgtagaaaaagatagtaagaatagaagctataatgtgttggaagacaaaatcaacacagcctatcgcagttggtatctttcgtacaattatggcgatcccgaaaaaggagtgcgttcctggacattgctcaccacctcagatgtcacctgcggagcagagcaggtttactggtcgcttccagacatgatgaaggatcctgtcactttccgctccactagacaagtcagtaactaccctgtggtgggtgcagagcttatgcccgtcttctcaaagagcttctacaacgaacaagctgtgtactcccagcagctccgccagtccacctcgcttacgcacgtcttcaaccgctttcctgagaaccagattttaatccgtccgccggcgcccaccattaccaccgtcagtgaaaacgttcctgctctcacagatcacgggaccctgccgttgcgcagcagtatccggggagtccaacgtgtgaccgttactgacgccagacgccgcacctgtccctacgtgtacaaggcactgggcatagtcgcaccgcgcgtcctttcaagccgcactttctaaaaaaaaaatgtccattcttatctcgcccagtaataacaccggttggggtctgcgcgctccaagcaagatgtacggaggcgcacgcaaacgttctacccaacatcccgtgcgtgttcgcggacattttcgcgctccatggggtgccctcaagggccgcactcgcgttcgaaccaccgtcgatgatgtaatcgatcaggtggttgccgacgcccgtaattatactcctactgcgcctacatctactgtggatgcagttattgacagtgtagtggctgacgctcgcaactatgctcgacgtaagagccggcgaaggcgcattgccagacgccaccgagctaccactgccatgcgagccgcaagagctctgctacgaagagctagacgcgtggggcgaagagccatgcttagggcggccagacgtgcagcttcgggcgccagcgccggcaggtcccgcaggcaagcagccgctgtcgcagcggcgactattgccgacatggcccaatcgcgaagaggcaatgtatactgggtgcgtgacgctgccaccggtcaacgtgtacccgtgcgcacccgtccccctcgcacttagaagatactgagcagtctccgatgttgtgtcccagcggcgaggatgtccaagcgcaaatacaaggaagaaatgctgcaggttatcgcacctgaagtctacggccaaccgttgaaggatgaaaaaaaaccccgcaaaatcaagcgggttaaaaaggacaaaaaagaagaggaagatggcgatgatgggctggcggagtttgtgcgcgagtttgccccacggcgacgcgtgcaatggcgtgggcgcaaagttcgacatgtgttgagacctggaacttcggtggtctttacacccggcgagcgttcaagcgctacttttaagcgttcctatgatgaggtgtacggggatgatgatattcttgagcaggcggctgaccgattaggcgagtttgcttatggcaagcgtagtagaataacttccaaggatgagacagtgtcaatacccttggatcatggaaatcccacccctagtcttaaaccggtcactttgcagcaagtgttacccgtaactccgcgaacaggtgttaaacgcgaaggtgaagatttgtatcccactatgcaactgatggtacccaaacgccagaagttggaggacgttttggagaaagtaaaagtggatccagatattcaacctgaggttaaagtgagacccattaagcaggtagcgcctggtctgggggtacaaactgtagacattaagattcccactgaaagtatggaagtgcaaactgaacccgcaaagcctactgccacctccactgaagtgcaaacggatccatggatgcccatgcctattacaactgacgccgccggtcccactcgaagatcccgacgaaagtacggtccagcaagtctgttgatgcccaattatgttgtacacccatctattattcctactcctggttaccgaggcactcgctactatcgcagccgaaacagtacctcccgccgtcgccgcaagacacctgcaaatcgcagtcgtcgccgtagacgcacaagcaaaccgactcccggcgccctggtgcggcaagtgtaccgcaatggtagtgcggaacctttgacactgccgcgtgcgcgttaccatccgagtatcatcacttaatcaatgttgccgctgcctccttgcagatatggccctcacttgtcgccttcgcgttcccatcactggttaccgaggaagaaactcgcgccgtagaagagggatgttgggacgcggaatgcgacgctacaggcgacggcgtgctatccgcaagcaattgcggggtggttttttaccagccttaattccaattatcgctgctgcaattggcgcgataccaggcatagcttccgtggcggttcaggcctcgcaacgacattgacattggaaaaaaaacgtataaataaaaaaaaatacaatggactctgacactcctggtcctgtgactatgttttcttagagatggaagacatcaatttttcatccttggctccgcgacacggcacgaagccgtacatgggcacctggagcgacatcggcacgagccaactgaacgggggcgccttcaattggagcagtatctggagcgggcttaaaaattttggctcaaccataaaaacatacgggaacaaagcttggaacagcagtacaggacaggcgcttagaaataaacttaaagaccagaacttccaacaaaaagtagtcgatgggatagcttccggcatcaatggagtggtagatttggctaaccaggctgtgcagaaaaagataaacagtcgtttggacccgccgccagcaaccccaggtgaaatgcaagtggaggaagaaattcctccgccagaaaaacgaggcgacaagcgtccgcgtcccgatttggaagagacgctggtgacgcgcgtagatgaaccgccttcttatgaggaagcaacgaagcttggaatgcccaccactagaccgatagccccaatggccaccggggtgatgaaaccttctcagttgcatcgacccgtcaccttggatttgccccctccccctgctgctactgctgtacccgcttctaagcctgtcgctgccccgaaaccagtcgccgtagccaggtcacgtcccgggggcgctcctcgtccaaatgcgcactggcaaaatactctgaacagcatcgtgggtctaggcgtgcaaagtgtaaaacgccgtcgctgcttttaattaaatatggagtagcgcttaacttgcctatctgtgtatatgtgtcattacacgccgtcacagcagcagaggaaaaaaggaagaggtcgtgcgtcgacgctgagttactttcaagatggccaccccatcgatgctgccccaatgggcatacatgcacatcgccggacaggatgcttcggagtacctgagtccgggtctggtgcagttcgcccgcgccacagacacctacttcaatctgggaaataagtttagaaatcccaccgtagcgccgacccacgatgtgaccaccgaccgtagccagcggctcatgttgcgcttcgtgcccgttgaccgggaggacaatacatactcttacaaagtgcggtacaccctggccgtgggcgacaacagagtgctggatatggccagcacgttctttgacattaggggcgtgttggacagaggtcccagtttcaaaccctattctggtacggcttacaactctctggctcctaaaggcgctccaaatgcatctcaatggattgcaaaaggcgtaccaactgcagcagccgcaggcaatggtgaagaagaacatgaaacagaggagaaaactgctacttacacttttgccaatgctcctgtaaaagccgaggctcaaattacaaaagagggcttaccaataggtttggagatttcagctgaaaacgaatctaaacccatctatgcagataaactttatcagccagaacctcaagtgggagatgaaacttggactgacctagacggaaaaaccgaagagtatggaggcagggctctaaagcctactactaacatgaaaccctgttacgggtcctatgcgaagcctactaatttaaaaggtggtcaggcaaaaccgaaaaactcggaaccgtcgagtgaaaaaattgaatatgatattgacatggaattttttgataactcatcgcaaagaacaaacttcagtcctaaaattgtcatgtatgcagaaaatgtaggtttggaaacgccagacactcatgtagtgtacaaacctggaacagaagacacaagttccgaagctaatttgggacaacagtctatgcccaacagacccaactacattggcttcagagataactttattggactcatgtactataacagtactggtaacatgggggtgctggctggtcaagcgtctcagttaaatgcagtggttgacttgcaggacagaaacacagaactttcttaccaactcttgcttgactctctgggcgacagaaccagatactttagcatgtggaatcaggctgtggacagttatgatcctgatgtacgtgttattgaaaatcatggtgtggaagatgaacttcccaactattgttttccactggacggcataggtgttccaacaaccagttacaaatcaatagttccaaatggagaagataataataattggaaagaacctgaagtaaatggaacaagtgagatcggacagggtaatttgtttgccatggaaattaaccttcaagccaatctatggcgaagtttcctttattccaatgtggctctgtatctcccagactcgtacaaatacaccccgtccaatgtcactcttccagaaaacaaaaacacctacgactacatgaacgggcgggtggtgccgccatctctagtagacacctatgtgaacattggtgccaggtggtctctggatgccatggacaatgtcaacccattcaaccaccaccgtaacgctggcttgcgttaccgatctatgcttctgggtaacggacgttatgtgcctttccacatacaagtgcctcaaaaattcttcgctgttaaaaacctgctgcttctcccaggctcctacacttatgagtggaactttaggaaggatgtgaacatggttctacagagttccctcggtaacgacctgcgggtagatggcgccagcatcagtttcacgagcatcaacctctatgctacttttttccccatggctcacaacaccgcttccacccttgaagccatgctgcggaatgacaccaatgatcagtcattcaacgactacctatctgcagctaacatgctctaccccattcctgccaatgcaaccaatattcccatttccattccttctcgcaactgggcggctttcagaggctggtcatttaccagactgaaaaccaaagaaactccctctttggggtctggatttgacccctactttgtctattctggttctattccctacctggatggtaccttctacctgaaccacacttttaagaaggtttccatcatgtttgactcttcagtgagctggcctggaaatgacaggttactatctcctaacgaatttgaaataaagcgcactgtggatggcgaaggctacaacgtagcccaatgcaacatgaccaaagactggttcttggtacagatgctcgccaactacaacatcggctatcagggcttctacattccagaaggatacaaagatcgcatgtattcatttttcagaaacttccagcccatgagcaggcaggtggttgatgaggtcaattacaaagacttcaaggccgtcgccataccctaccaacacaacaactctggctttgtgggttacatggctccgaccatgcgccaaggtcaaccctatcccgctaactatccctatccactcattggaacaactgccgtaaatagtgttacgcagaaaaagttcttgtgtgacagaaccatgtggcgcataccgttctcgagcaacttcatgtctatgggggcccttacagacttgggacagaatatgctctatgccaactcagctcatgctctggacatgacctttgaggtggatcccatggatgagcccaccctgctttatcttctcttcgaagttttcgacgtggtcagagtgcatcagccacaccgcggcatcatcgaggcagtctacctgcgtacaccgttctcggccggtaacgctaccacgtaagaagcttcttgcttcttgcaaatagcagctgcaaccatggcctgcggatcccaaaacggctccagcgagcaagagctcagagccattgtccaagacctgggttgcggaccctattttttgggaacctacgataagcgcttcccggggttcatggcccccgataagctcgcctgtgccattgtaaatacggccggacgtgagacggggggagagcactggttggctttcggttggaacccacgttctaacacctgctacctttttgatccttttggattctcggatgatcgtctcaaacagatttaccagtttgaatatgagggtctcctgcgccgcagcgctcttgctaccaaggaccgctgtattacgctggaaaaatctacccagaccgtgcagggcccccgttctgccgcctgcggacttttctgctgcatgttccttcacgcctttgtgcactggcctgaccgtcccatggacggaaaccccaccatgaaattgctaactggagtgccaaacaacatgcttcattctcctaaagtccagcccaccctgtgtgacaatcaaaaagcactctaccattttcttaatacccattcgccttattttcgctctcatcgtacacacatcgaaagggccactgcgttcgaccgtatggatgttcaataatgactcatgtaaacaacgtgttcaataaacatcactttatttttttacatgtatcaaggctctggattacttatttatttacaagtcgaatgggttctgacgagaatcagaatgacccgcaggcagtgatacgttgcggaactgatacttgggttgccacttgaattcgggaatcaccaacttgggaaccggtatatcgggcaggatgtcactccacagctttctggtcagctgcaaagctccaagcaggtcaggagccgaaatcttgaaatcacaattaggaccagtgctctgagcgcgagagttgcggtacaccggattgcagcactgaaacaccatcagcgacggatgtctcacgcttgccagcacggtgggatctgcaatcatgcccacatccagatcttcagcattggcaatgctgaacggggtcatcttgcaggtctgcctacccatggcgggcacccaattaggcttgtggttgcaatcgcagtgcagggggatcagtatcatcttggcctgatcctgtctgattcctggatacacggctctcatgaaagcatcatattgcttgaaagcctgctgggctttactaccctcggtataaaacatcccgcaggacctgctcgaaaactggttagctgcacagccggcatcattcacacagcagcgggcgtcattgttggctatttgcaccacacttctgccccagcggttttgggtgattttggttcgctcgggattctcctttaaggctcgttgtccgttctcgctggccacatccatctcgataatctgctccttctgaatcataatattgccatgcaggcacttcagcttgccctcataatcattgcagccatgaggccacaacgcacagcctgtacattcccaattatggtgggcgatctgagaaaaagaatgtatcattccctgcagaaatcttcccatcatcgtgctcagtgtcttgtgactagtgaaagttaactggatgcctcggtgctcttcgtttacgtactggtgacagatgcgcttgtattgttcgtgttgctcaggcattagtttaaaacaggttctaagttcgttatccagcctgtacttctccatcagcagacacatcacttccatgcctttctcccaagcagacaccaggggcaagctaatcggattcttaacagtgcaggcagcagctcctttagccagagggtcatctttagcgatcttctcaatgcttcttttgccatccttctcaacgatgcgcacgggcgggtagctgaaacccactgctacaagttgcgcctcttctctttcttcttcgctgtcttgactgatgtcttgcatggggatatgtttggtcttccttggcttctttttggggggtatcggaggaggaggactgtcgctccgttccggagacagggaggattgtgacgtttcgctcaccattaccaactgactgtcggtagaagaacctgaccccacacggcgacaggtgtttttcttcgggggcagaggtggaggcgattgcgaagggctgcggtccgacctggaaggcggatgactggcagaaccccttccgcgttcgggggtgtgctccctgtggcggtcgcttaactgatttccttcgcggctggccattgtgttctcctaggcagagaaacaacagacatggaaactcagccattgctgtcaacatcgccacgagtgccatcacatctcgtcctcagcgacgaggaaaaggagcagagcttaagcattccaccgcccagtcctgccaccacctctaccctagaagataaggaggtcgacgcatctcatgacatgcagaataaaaaagcgaaagagtctgagacagacatcgagcaagacccgggctatgtgacaccggtggaacacgaggaagagttgaaacgctttctagagagagaggatgaaaactgcccaaaacagcgagcagataactatcaccaagatgctggaaatagggatcagaacaccgactacctcatagggcttgacggggaagacgcgctccttaaacatctagcaagacagtcgctcatagtcaaggatgcattattggacagaactgaagtgcccatcagtgtggaagagctcagctgcgcctacgagcttaaccttttttcacctcgtactccccccaaacgtcagccaaacggcacctgcgagccaaatcctcgcttaaacttttatccagcttttgctgtgccagaagtactggctacctatcacatcttttttaaaaatcaaaaaattccagtctcctgccgcgctaatcgcacccgcgccgatgccctactcaatctgggacctggttcacgcttacctgatatagcttccttggaagaggttccaaagatcttcgagggtctgggcaataatgagactcgggccgcaaatgctctgcaaaagggagaaaatggcatggatgagcatcacagcgttctggtggaattggaaggcgataatgccagactcgcagtactcaagcgaagcgtcgaggtcacacacttcgcatatcccgctgtcaacctgccccctaaagtcatgacggcggtcatggaccagttactcattaagcgcgcaagtcccctttcagaagacatgcatgacccagatgcctgtgatgagggtaaaccagtggtcagtgatgagcagctaacccgatggctgggcaccgactctccccgggatttggaagagcgtcgcaagcttatgatggccgtggtgctggttaccgtagaactagagtgtctccgacgtttctttaccgattcagaaaccttgcgcaaactcgaagagaatctgcactacacttttagacacggctttgtgcggcaggcatgcaagatatctaacgtggaactcaccaacctggtttcctacatgggtattctgcatgagaatcgcctaggacaaagcgtgctgcacagcacccttaagggggaagcccgccgtgattacatccgcgattgtgtctatctctacctgtgccacacgtggcaaaccggcatgggtgtatggcagcaatgtttagaagaacagaacttgaaagagcttgacaagctcttacagaaatctcttaaggttctgtggacagggttcgacgagcgcaccgtcgcttccgacctggcagacctcatcttcccagagcgtctcagggttactttgcgaaacggattgcctgactttatgagccagagcatgcttaacaattttcgctctttcatcctggaacgctccggtatcctgcccgccacctgctgcgcactgccctccgactttgtgcctctcacctaccgcgagtgccccccgccgctatggagtcactgctacctgttccgtctggccaactatctctcctaccactcggatgtgatcgaggatgtgagcggagacggcttgctggagtgccactgccgctgcaatctgtgcacgccccaccggtccctagcttgcaacccccagttgatgagcgaaacccagataataggcacctttgaattgcaaggccccagcagccaaggcgatgggtcttctcctgggcaaagtttaaaactgaccccgggactgtggacctccgcctacttgcgcaagtttgctccggaagattaccacccctatgaaatcaagttctatgaggaccaatcacagcctccaaaggccgaactttcggcttgcgtcatcacccagggggcaattctggcccaattgcaagccatccaaaaatcccgccaagaatttctactgaaaaagggtaagggggtctaccttgacccccagaccggcgaggaactcaacacaaggttccctcaggatgtcccaacgacgagaaaacaagaagttgaaggtgcagccgccgcccccagaagatatggaggaagattgggacagtcaggcagaggaggcggaggaggacagtctggaggacagtctggaggaagacagtttggaggaggaaaacgaggaggcagaggaggtggaagaagtaaccgccgacaaacagttatcctcggctgcggagacaagcaacagcgctaccatctccgctccgagtcgaggaacccggcggcgtcccagcagtagatgggacgagaccggacgcttcccgaacccaaccagcgcttccaagaccggtaagaaggatcggcagggatacaagtcctggcgggggcataagaatgccatcatctcctgcttgcatgagtgcgggggcaacatatccttcacgcggcgctacttgctattccaccatggggtgaactttccgcgcaatgttttgcattactaccgtcacctccacagcccctactatagccagcaaatcccgacagtctcgacagataaagacagcggcggcgacctccaacagaaaaccagcagcggcagttagaaaatacacaacaagtgcagcaacaggaggattaaagattacagccaacgagccagcgcaaacccgagagttaagaaatcggatctttccaaccctgtatgccatcttccagcagagtcggggtcaagagcaggaactgaaaataaaaaaccgatctctgcgttcgctcaccagaagttgtttgtatcacaagagcgaagatcaacttcagcgcactctcgaggacgccgaggctctcttcaacaagtactgcgcgctgactcttaaagagtaggcagcgaccgcgcttattcaaaaaaggcgggaattacatcatcctcgacatgagtaaagaaattcccacgccttacatgtggagttatcaaccccaaatgggattggcagcaggcgcctcccaggactactccacccgcatgaattggctcagcgccgggccttctatgatttctcgagttaatgatatacgcgcctaccgaaaccaaatacttttggaacagtcagctcttaccaccacgccccgccaacaccttaatcccagaaattggcccgccgccctagtgtaccaggaaagtcccgctcccaccactgtattacttcctcgagacgcccaggccgaagtccaaatgactaatgcaggtgcgcagttagctggcggctccaccctatgtcgtcacaggcctcggcataatataaaacgcctgatgatcagaggccgaggtatccagctcaacgacgagtcggtgagctctccgcttggtctacgaccagacggaatctttcagattgccggctgcgggagatcttccttcacccctcgtcaggctgttctgactttggaaagttcgtcttcgcaaccccgctcgggcggaatcgggaccgttcaatttgtagaggagtttactccctctgtctacttcaaccccttctccggatctcctgggcactacccggacgagttcataccgaacttcgacgcgattagcgagtcagtggacggctacgattgatgtctggtgacgcggctgagctatctcggctgcgacatctagaccactgccgccgctttcgctgctttgcccgggaacttattgagttcatctacttcgaactccccaaggatcaccctcaaggtccggcccacggagtgcggattactatcgaaggcaaaatagactctcgcctgcaacgaattttctcccagcggcccgtgctgatcgagcgagaccagggaaacaccacggttagtaatcaattacggggtcattagttcatagcccatatatggagttaacttgtttattgcagcttataatggttacaaataaagcaatagcatcacaaatttcacaaataaagcatttttttcactgcattctagttgtggtttgtccaaactcatcaatgtatcttatcatgtctgctcgaagcggccggccgccccgactctagagtcgcggcctcattaggaagttcctatactttctagagaataggaacttctcagaagaactcgtcaagaaggcgatagaaggcgatgcgctgcgaatcgggagcggcgataccgtaaagcacgaggaagcggtcagcccattcgccgccaagctcttcagcaatatcacgggtagccaacgctatgtcctgatagcggtccgccacacccagccggccacagtcgatgaatccagaaaagcggccattttccaccatgatattcggcaagcaggcatcgccatgggtcacgacgagatcctcgccgtcgggcatgcgcgccttgagcctggcgaacagttcggctggcgcgagcccctgatgctcttcgtccagatcatcctgatcgacaagaccggcttccatccgagtacgtgctcgctcgatgcgatgtttcgcttggtggtcgaatgggcaggtagccggatcaagcgtatgcagccgccgcattgcatcagccatgatggatactttctcggcaggagcaaggtgagatgacaggagatcctgccccggcacttcgcccaatagcagccagtcccttcccgcttcagtgacaacgtcgagcacagctgcgcaaggaacgcccgtcgtggccagccacgatagccgcgctgcctcgtcctgcagttcattcagggcaccggacaggtcggtcttgacaaaaagaaccgggcgcccctgcgctgacagccggaacacggcggcatcagagcagccgattgcctgttgtgcccagtcatagccgaatagcctctccacccaagcggccggagaacctgcgtgcaatccatcttgttcaatggccgatcccataacaccccttgtattactgtttatgtaagcagacagttttactgttcgtgatgatatatttttatcttgtgcaatgtaacaggttgtggccatagcgggcccgggattttcctccacgtccccgcatgttagaagacttcccctgccctcggctctggaagttcctatactttctagagaataggaacttcccgccagaatgcgttcgcacagccgccagccggtcactccgttgatggttactcggaacagcagggagccgtcggggttgatcaggcgctcgtcgataattttgttgccgttccacagggtccctgttacagtgatctttttgccgtcgaacacggcgatgccttcatacggccgtccgaaatagtcgatcatgttcggcgtaaccccgtcgattaccagtgtgccatagtgcaggatcaccttaaagtgatgatcatccacagggtacaccaccttaaaaattttttcgatctggcccatttggtcgccgctcagaccttcatacgggatgatgacatggatgtcgatcttcagcccattttcaccgctcaggacaatcctttggatcggagttacggacaccccgagattctgaaacaaactggacacacctccctgttcaaggacttggtccaggttgtagccggctgtctgtcgccagtccccaacgaaatcttcgagtgtgaagaccatggatccgggcccggggttttcttcaacgtctccagcctgcttcagcaggctgaagttagtagctccgcttcctcgagctcgagatctggcgaaggcgatgggggtcttgaaggcgtgctggtactccacgatgcccagctcggtgttgctgtgcagctcctccacgcggcggaaggcgaacatggggcccccgttctgcaggatgctggggtggatggcgctcttgaagtgcatgtggctgtccaccacgaagctgtagtagccgccgtcgcgcaggctgaaggtgcgggcgaagctgcccaccagcacgttatcgcccatggggtgcaggtgctccacggtggcgttgctgcggatgatcttgtcggtgaagatcacgctgtcctcggggaagccggtgcccaccaccttgaagtcgccgatcacgcggccggcctcgtagcggtagctgaagctcacgtgcagcacgccgccgtcctcgtacttctcgatgcgggtgttggtgtagccgccgttgttgatggcgtgcaggaaggggttctcgtagccgctggggtaggtgccgaagtggtagaagccgtagcccatcacgtggctcagcaggtaggggctgaaggtcagggcgcctttggtgctcttcatcttgttggtcatgcggccctgctcgggggtgccctctccgccgcccaccagctcgaactccacgccgttcagggtgccggtgatgcggcactcgatcttcatggcgggcatggtggcgaccggtagcgctagcggcttcggtaccacgcgttcgctcgaattaatcaattctttgccaaaatgatgagacagcacaataaccagcacgttgcccaggagctgtaggaaaaagaagaaggcatgaacatggttagcagaggctctagagccgccggtcacacgccagaagccgaaccccgccctgccccgtcccccccgaaggcagccgtccccccgcggacagccccgaggctggagagggagaaggggacggcggcgcggcgacgcacgaaggccctccccgcccatttccttcctgccggggccctcccggagcccctcaaggctttcacgcagccacagaaaagaaacaagccgtcattaaaccaagcgctaattacagcccggaggagaagggccgtcccgcccgctcacctgtgggagtaacgcggtcagtcagagccggggcgggcggcgcgaggcggcgcggagcggggcacggggcgaaggcaacgcagcgactcccgcccgccgcgcgcttcgctttttatagggccgccgccgccgccgcctcgccataaaaggaaactttcggagcgcgccgctctgattggctgccgccgcacctctccgcctcgccccgccccgcccctcgccccgccccgccccgcctggcgcgcgccccccccccccccccgcccccatcgctgcacaaaataattaaaaaataaataaatacaaaattgggggtggggaggggggggagatggggagagtgaagcagaacgtggggctcacctcgaccatggtaatagcgatgactaatacgtagatgtactgccaagtaggaaagtcccataaggtcatgtactgggcataatgccaggcgggccatttaccgtcattgacgtcaatagggggcgtacttggcatatgatacacttgatgtactgccaagtgggcagtttaccgtaaatactccacccattgacgtcaatggaaagtccctattggcgttactatgggaacatacgtcattattgacgtcaatgggcgggggtcgttgggcggtcagccaggcgggccatttaccgtaagttatgtaacgcggaacaacaacaattgcattcattttatgtttcaggttcagggggaggtgtggtcctgcgattccatcgagtgcacctacaccctgctgaagaccctatgcggcctaagagacctgctaccaatgaattaaaaaaaaatgattaataaaaaatcacttacttgaaatcagcaataaggtctctgttgaaattttctcccagcagcacctcacttccctcttcccaactctggtattctaaaccccgttcagcggcatactttctccatactttaaaggggatgtcaaattttagctcctctcctgtacccacaatcttcatgtctttcttcccagatgaccaagagagtccggctcagtgactccttcaaccctgtctacccctatgaagatgaaagcacctcccaacacccctttataaacccagggtttatttccccaaatggcttcacacaaagcccagacggagttcttactttaaaatgtttaaccccactaacaaccacaggcggatctctacagctaaaagtgggagggggacttacagtggatgacactgatggtaccttacaagaaaacatacgtgctacagcacccattactaaaaataatcactctgtagaactatccattggaaatggattagaaactcaaaacaataaactatgtgccaaattgggaaatgggttaaaatttaacaacggtgacatttgtataaaggatagtattaacaccttatggactggaataaaccctccacctaactgtcaaattgtggaaaacactaatacaaatgatggcaaacttactttagtattagtaaaaaatggagggcttgttaatggctacgtgtctctagttggtgtatcagacactgtgaaccaaatgttcacacaaaagacagcaaacatccaattaagattatattttgactcttctggaaatctattaactgaggaatcagacttaaaaattccacttaaaaataaatcttctacagcgaccagtgaaactgtagccagcagcaaagcctttatgccaagtactacagcttatcccttcaacaccactactagggatagtgaaaactacattcatggaatatgttactacatgactagttatgatagaagtctatttcccttgaacatttctataatgctaaacagccgtatgatttcttccaatgttgcctatgccatacaatttgaatggaatctaaatgcaagtgaatctccagaaagcaacatagctacgctgaccacatccccctttttcttttcttacattacagaagacgacaactaaaataaagtttaagtgtttttatttaaaatcacaaaattcgagtagttattttgcctccaccttcccatttgacagaatacacagtcctttctccccggctggccttaaaaagcatcatatcatgggtaacagacatattcttaggtgttatattccacacggtttcctgtcgagccaaacgctcatcagtgatattaataaactccccgggcagctcacttaagttcatgtcgctgtccagctgctgagccacaggctgctgtccaacttgcggttgcttaacgggcggcgaaggagaagtccacgcctacatgggggtagagtcataatcgtgcatcaggatagggcggtggtgctgcagcagcgcgcgaataaactgctgccgccgccgctccgtcctgcaggaatacaacatggcagtggtctcctcagcgatgattcgcaccgcccgcagcataaggcgccttgtcctccgggcacagcagcgcaccctgatctcacttaaatcagcacagtaactgcagcacagcaccacaatattgttcaaaatcccacagtgcaaggcgctgtatccaaagctcatggcggggaccacagaacccacgtggccatcataccacaagcgcaggtagattaagtggcgacccctcataaacacgctggacataaacattacctcttttggcatgttgtaattcaccacctcccggtaccatataaacctctgattaaacatggcgccatccaccaccatcctaaaccagctggccaaaacctgcccgccggctatacactgcagggaaccgggactggaacaatgacagtggagagcccaggactcgtaaccatggatcatcatgctcgtcatgatatcaatgttggcacaacacaggcacacgtgcatacacttcctcaggattacaagctcctcccgcgttagaaccatatcccagggaacaacccattcctgaatcagcgtaaatcccacactgcagggaagacctcgcacgtaactcacgttgtgcattgtcaaagtgttacattcgggcagcagcggatgatcctccagtatggtagcgcgggtttctgtctcaaaaggaggtagacgatccctactgtacggagtgcgccgagacaaccgagatcgtgttggtcgtagtgtcatgccaaatggaacgccggacgtagtcattctcgtattttgtatagcaaaacgcggccctggcagaacacactcttcttcgccttctatcctgccgcttagcgtgttccgtgtgatagttcaagtacagccacactcttaagttggtcaaaagaatgctggcttcagttgtaatcaaaactccatcgcatctaattgttctgaggaaatcatccacggtagcatatgcaaatcccaaccaagcaatgcaactggattgcgtttcaagcaggagaggagagggaagagacggaagaaccatgttaatttttattccaaacgatctcgcagtacttcaaattgtagatcgcgcagatggcatctctcgcccccactgtgttggtgaaaaagcacagctaaatcaaaagaaatgcgattttcaaggtgctcaacggtggcttccaacaaagcctccacgcgcacatccaagaacaaaagaataccaaaagaaggagcattttctaactcctcaatcatcatattacattcctgcaccattcccagataattttcagctttccagccttgaattattcgtgtcagttcttgtggtaaatccaatccacacattacaaacaggtcccggagggcgccctccaccaccattcttaaacacaccctcataatgacaaaatatcttgctcctgtgtcacctgtagcgaattgagaatggcaacatcaattgacatgcccttggctctaagttcttctttaagttctagttgtaaaaactctctcatattatcaccaaactgcttagccagaagccccccgggaacaagagcaggggacgctacagtgcagtacaagcgcagacctccccaattggctccagcaaaaacaagattggaataagcatattgggaaccaccagtaatatcatcgaagttgctggaaatataatcaggcagagtttcttgtagaaattgaataaaagaaaaatttgccaaaaaaacattcaaaacctctgggatgcaaatgcaataggttaccgcgctgcgctccaacattgttagttttgaattagtctgcaaaaataaaaaaaaaacaagcgtcatatcatagtagcctgacgaacaggtggataaatcagtctttccatcacaagacaagccacagggtctccagctcgaccctcgtaaaacctgtcatcgtgattaaacaacagcaccgaaagttcctcgcggtgaccagcatgaataagtcttgatgaagcatacaatccagacatgttagcatcagttaaggagaaaaaacagccaacatagcctttgggtataattatgcttaatcgtaagtatagcaaagccacccctcgcggatacaaagtaaaaggcacaggagaataaaaaatataattatttctctgctgctgtttaggcaacgtcgcccccggtccctctaaatacacatacaaagcctcatcagccatggcttaccagagaaagtacagcgggcacacaaaccacaagctctaaagtcactctccaacctctccacaatatatatacacaagccctaaactgacgtaatgggactaaagtgtaaaaaatcccgccaaacccaacacacaccccgaaactgcgtcaccagggaaaagtacagtttcacttccgcaatcccaacaagcgtcacttcctctttctcacggtacgtcacatcccattaacttacaacgtcattttcccacggccgcgccgccccttttaaccgttaaccccacagccaatcaccacacggcccacactttttaaaatcacctcatttacatattggcaccattccatctataaggtatattattgatgatggccaagctatttaggtgacactatagaatactcaagctatgcatcaagcttggtaccgagctcggatccactagtaacggccgccagtgtgctggaattcgcccttgtttaaacgcgatcgcttgagatcgttttggtctgcgcgtaatctcttgctctgaaaacgaaaaaaccgccttgcagggcggtttttcgaaggttctctgagctaccaactctttgaaccgaggtaactggcttggaggagcgcagtcaccaaaacttgtcctttcagtttagccttaaccggcgcatgacttcaagactaactcctctaaatcaattaccagtggctgctgccagtggtgcttttgcatgtctttccgggttggactcaagacgatagttaccggataaggcgcagcggtcggactgaacggggggttcgtgcatacagtccagcttggagcgaactgcctacccggaactgagtgtcaggcgtggaatgagacaaacgcggccataacagcggaatgacaccggtaaaccgaaaggcaggaacaggagagcgcacgagggagccgccagggggaaacgcctggtatctttatagtcctgtcgggtttcgccaccactgatttgagcgtcagatttcgtgatgcttgtcaggggggcggagcctatggaaaaacggctttgccgcggccctctcacttccctgttaagtatcttcctggcatcttccaggaaatctccgccccgttcgtaagccatttccgctcgccgcagtcgaacgaccgagcgtagcgagtcagtgagcgaggaagcggaatatatcctgtatcacatattctgctgacgcaccggtgcagccttttttctcctgccacatgaagcacttcactgacaccctcatcagtgccaacatagtaagccagtatacactccgctagcgcgatcgcttaattaatttaaatcctgcagggtttaaacggccggcctagggataacagggtaatcgtaactataacggtcctaaggtagcgaatgatgtccggcggtgcttttgccgttacgcaccaccccgtcagtagctgaacaggagggacagctgatagaaacagaagccactggagcacctcaaaaacaccatcatacactaaatcagtaagttggcagcatcacccgacgcactttgcgccgaataaatacctgtgacggaagatcacttcgcagaataaataaatcctggtgtccctgttgataccgggaagccctgggccaacttttggcgaaaatgagacgttgatcggcacgtaagaggttccaactttcaccataatgaaataagatcactaccgggcgtattttttgagttatcgagattttcaggagctaaggaagctaaaatggagaaaaaaatcactggatataccaccgttgatatatcccaatggcatcgtaaagaacattttgaggcatttcagtcagttgctcaatgtacctataaccagaccgttcagctggatattacggcctttttaaagaccgtaaagaaaaataagcacaagttttatccggcctttattcacattcttgcccgcctgatgaatgctcatccggaattccgtatggcaatgaaagacggtgagctggtgatatgggatagtgttcacccttgttacaccgttttccatgagcaaactgaaacgttttcatcgctctggagtgaataccacgacgatttccggcagtttctacacatatattcgcaagatgtggcgtgttacggtgaaaacctggcctatttccctaaagggtttattgagaatatgtttttcgtctcagccaatccctgggtgagtttcaccagttttgatttaaacgtggccaatatggacaacttcttcgcccccgttttcaccatgggcaaatattatacgcaaggcgacaaggtgctgatgccgctggcgattcaggttcatcatgccgtctgtgatggcttccatgtcggcagaatgcttaatgaattacaacagtactgcgatgagtggcagggcggggcgtaacctgcaggttaattaaggaagggcgaattctgcagatatccatcacactggcggccgctcgagcatgcatctagagggcccaattcgccctatagtgagtcgtattacaattcactggcc

SEQ ID NO: 57 - DNA, 34784 bp, Artificial Sequence
  PS2
catcatcaataatataccttatagatggaatggtgccaatatgtaaatgaggtgattttaaaaagtgtgggccgtgtggtgattggctgtggggttaacggttaaaaggggcggcgcggccgtgggaaaatgacgttttatgggggtggagtttttttgcaagttgtcgcgggaaatgataacttcgtatagcatacattatacgaagttattagactttgacccattacgtggaggtttcgattaccgtgttttttacctgaatttccgcgtaccgtgtcaaagtcttctgtttttacgtaggtgtcagctgatcgctagggtatttataacttcgtatagcatacattatacgaagttatggaatgtttatgccttaccagtgtaacatgaatcatgtgaaagtgttgttggaaccagatgccttttccagaatgagcctaacaggaatctttgacatgaacacgcaaatctggaagatcctgaggtatgatgatacgagatcgagggtgcgcgcatgcgaatgcggaggcaagcatgccaggttccagccggtgtgtgtagatgtgaccgaagatctcagaccggatcatttggttattgcccgcactggagcagagttcggatccagtggagaagaaactgactaaggtgagtattgggaaaactttggggtgggattttcagatggacagattgagtaaaaatttgttttttctgtcttgcagctgacatgagtggaaatgcttcttttaaggggggagtcttcagcccttatctgacagggcgtctcccatcctgggcaggagttcgtcagaatgttatgggatctactgtggatggaagacccgttcaacccgccaattcttcaacgctgacctatgctactttaagttcttcacctttggacgcagctgcagccgctgccgccgcctctgtcgccgctaacactgtgcttggaatgggttactatggaagcatcgtggctaattccacttcctctaataacccttctacactgactcaggacaagttacttgtccttttggcccagctggaggctttgacccaacgtctgggtgaactttctcagcaggtggccgagttgcgagtacaaactgagtctgctgtcggcacggcaaagtctaaataaaaaaaattccagaatcaatgaataaataaacgagcttgttgttgatttaaaatcaagtgtttttatttcatttttcgcgcacggtatgccctggaccaccgatctcgatcattgagaactcggtggattttttccagaatcctatagaggtgggattgaatgtttagatacatgggcattaggccgtctttggggtggagatagctccattgaagggattcatgctccggggtagtgttgtaaatcacccagtcataacaaggtcgcagtgcatggtgttgcacaatatcttttagaagtaggctgattgccacagataagcccttggtgtaggtgtttacaaaccggttgagctgggaggggtgcattcgaggtgaaattatgtgcattttggattggatttttaagttggcaatattgccgccaagatcccgtcttgggttcatgttatgaaggactaccaagacggtgtatccggtacatttaggaaatttatcgtgcagcttggatggaaaagcgtggaaaaatttggagacacccttgtgtcctccgagattttccatgcactcatccatgataatagcaatggggccgtgggcagcggcgcgggcaaacacgttccgtgggtctgacacatcatagttatgttcctgagttaaatcatcataagccattttaatgaatttggggcggagcgtaccagattggggtatgaatgttccttcgggccccggagcatagttcccctcacagatttgcatttcccaagctttcagttctgagggtggaatcatgtccacctggggggctatgaagaacaccgtttcgggggcgggggtgattagttgggatgatagcaagtttctgagcaattgagatttgccacatccggtggggccataaataattccgattacaggttgcaggtggtagtttagggaacggcaactgccgtcttctcgaagcaagggggccacctcgttcatcatttcccttacatgcatattttcccgcaccaaatccattaggaggcgctctcctcctagtgatagaagttcttgtagtgaggaaaagtttttcagcggttttagaccgtcagccatgggcattttggaaagagtttgctgcaaaagttctagtctgttccacagttcagtgatgtgttctatggcatctcgatccagcagacctcctcgtttcgcgggtttggacggctcctggagtagggtatgagacgatgggcgtccagcgctgccagggttcggtccttccagggtctcagtgttcgagtcagggttgtttccgtcacagtgaaggggtgtgcgcctgcttgggcgcttgccagggtgcgcttcagactcattctgctggtggagaacttctgtcgcttggcgccctgtatgtcggccaagtagcagtttaccatgagttcgtagttgagcgcctcggctgcgtggcctttggcgcggagcttacctttggaagttttcttgcataccgggcagtataggcatttcagcgcatacagcttgggcgcaaggaaaatggattctggggagtatgcatccgcgccgcaggaggcgcaaacagtttcacattccaccagccaggttaaatccggttcattggggtcaaaaacaagttttccgccatattttttgatgcgtttcttacctttggtctccataagttcgtgtcctcgttgagtgacaaacaggctgtccgtatctccgtagactgattttacaggcctcttctccagtggagtgcctcggtcttcttcgtacaggaactctgaccactctgatacaaaggcgcgcgtccaggccagcacaaaggaggctatgtgggaggggtagcgatcgttgtcaaccagggggtccaccttttccaaagtatgcaaacacatgtcaccctcttcaacatccaggaatgtgattggcttgtaggtgtatttcacgtgacctggggtccccgctgggggggtataaaagggggcggttctttgctcttcctcactgtcttccggatcgctgtccaggaacgtcagctgttggggtaggtattccctctcgaaggcgggcatgacctctgcactcaggttgtcagtttctaagaacgaggaggatttgatattgacagtgccggttgagatgcctttcatgaggttttcgtccatttggtcagaaaacacaatttttttattgtcaagtttggtggcaaatgatccatacagggcgttggataaaagtttggcaatggatcgcatggtttggttcttttccttgtccgcgcgctctttggcggcgatgttgagttggacatactcgcgtgccaggcacttccattcggggaagatagttgttaattcatctggcacgattctcacttgccaccctcgattatgcaaggtaattaaatccacactggtggccacctcgcctcgaaggggttcattggtccaacagagcctacctcctttcctagaacagaaagggggaagtgggtctagcataagttcatcgggagggtctgcatccatggtaaagattcccggaagtaaatccttatcaaaatagctgatgggagtggggtcatctaaggccatttgccattctcgagctgccagtgcgcgctcatatgggttaaggggactgccccagggcatgggatgggtgagagcagaggcatacatgccacagatgtcatagacgtagatgggatcctcaaagatgcctatgtaggttggatagcatcgcccccctctgatacttgctcgcacatagtcatatagttcatgtgatggcgctagcagccccggacccaagttggtgcgattgggtttttctgttctgtagacgatctggcgaaagatggcgtgagaattggaagagatggtgggtctttgaaaaatgttgaaatgggcatgaggtagacctacagagtctctgacaaagtgggcataagattcttgaagcttggttaccagttcggcggtgacaagtacgtctagggcgcagtagtcaagtgtttcttgaatgatgtcataacctggttggtttttcttttcccacagttcgcggttgagaaggtattcttcgcgatccttccagtactcttctagcggaaacccgtctttgtctgcacggtaagatcctagcatgtagaactgattaactgccttgtaagggcagcagcccttctctacgggtagagagtatgcttgagcagcttttcgtagcgaagcgtgagtaagggcaaaggtgtctctgaccatgactttgagaaattggtatttgaagtccatgtcgtcacaggctccctgttcccagagttggaagtctacccgtttcttgtaggcggggttgggcaaagcgaaagtaacatcattgaagagaatcttaccggctctgggcataaaattgcgagtgatgcggaaaggctgtggtacttccgctcgattgttgatcacctgggcagctaggacgatttcgtcgaaaccgttgatgttgtgtcctacgatgtataattctatgaaacgcggcgtgcctctgacgtgaggtagcttactgagctcatcaaaggttaggtctgtggggtcagataaggcgtagtgttcgagagcccattcgtgcaggtgaggatttgcatgtaggaatgatgaccaaagatctaccgccagtgctgtttgtaactggtcccgatactgacgaaaatgccggccaattgccattttttctggagtgacacagtagaaggttctggggtcttgttgccatcgatcccacttgagtttaatggctagatcgtgggccatgttgacgagacgctcttctcctgagagtttcatgaccagcatgaaaggaactagttgtttgccaaaggatcccatccaggtgtaagtttccacatcgtaggtcaggaagagtctttctgtgcgaggatgagagccgatcgggaagaactggatttcctgccaccagttggaggattggctgttgatgtgatggaagtagaagtttctgcggcgcgccgagcattcgtgtttgtgcttgtacagacggccgcagtagtcgcagcgttgcacgggttgtatctcgtgaatgagctgtacctggcttcccttgacgagaaatttcagtgggaagccgaggcctggcgattgtatctcgtgctcttctatattcgctgtatcggcctgttcatcttctgtttcgatggtggtcatgctgacgagcccccgcgggaggcaagtccagacctcggcgcgggaggggcggagctgaaggacgagagcgcgcaggctggagctgtccagagtcctgagacgctgcggactcaggttagtaggtagggacagaagattaacttgcatgatcttttccagggcgtgcgggaggttcagatggtacttgatttccacaggttcgtttgtagagacgtcaatggcttgcagggttccgtgtcctttgggcgccactaccgtacctttgttttttcttttgatcggtggtggctctcttgcttcttgcatgctcagaagcggtgacggggacgcgcgccgggcggcagcggttgttccggacccgggggcatggctggtagtggcacgtcggcgccgcgcacgggcaggttctggtattgcgctctgagaagacttgcgtgcgccaccacgcgtcgattgacgtcttgtatctgacgtctctgggtgaaagctaccggccccgtgagcttgaacctgaaagagagttcaacagaatcaatttcggtatcgttaacggcagcttgtctcagtatttcttgtacgtcaccagagttgtcctggtaggcgatctccgccatgaactgctcgatttcttcctcctgaagatctccgcgacccgctctttcgacggtggccgcgaggtcattggagatacggcccatgagttgggagaatgcattcatgcccgcctcgttccagacgcggctgtaaaccacggccccctcggagtctcttgcgcgcatcaccacctgagcgaggttaagctccacgtgtctggtgaagaccgcatagttgcataggcgctgaaaaaggtagttgagtgtggtggcaatgtgttcggcgacgaagaaatacatgatccatcgtctcagcggcatttcgctaacatcgcccagagcttccaagcgctccatggcctcgtagaagtccacggcaaaattaaaaaactgggagtttcgcgcggacacggtcaattcctcctcgagaagacggatgagttcggctatggtggcccgtacttcgcgttcgaaggctcccgggatctcttcttcctcttctatctcttcttccactaacatctcttcttcgtcttcaggcgggggcggagggggcacgcggcgacgtcgacggcgcacgggcaaacggtcgatgaatcgttcaatgacctctccgcggcggcggcgcatggtttcagtgacggcgcggccgttctcgcgcggtcgcagagtaaaaacaccgccgcgcatctccttaaagtggtgactgggaggttctccgtttgggagggagagggcgctgattatacattttattaattggcccgtagggactgcgcgcagagatctgatcgtgtcaagatccacgggatctgaaaacctttcgacgaaagcgtctaaccagtcacagtcacaaggtaggctgagtacggcttcttgtgggcgggggtggttatgtgttcggtctgggtcttctgtttcttcttcatctcgggaaggtgagacgatgctgctggtgatgaaattaaagtaggcagttctaagacggcggatggtggcgaggagcaccaggtctttgggtccggcttgctggatacgcaggcgattggccattccccaagcattatcctgacatctagcaagatctttgtagtagtcttgcatgagccgttctacgggcacttcttcctcacccgttctgccatgcatacgtgtgagtccaaatccgcgcattggttgtaccagtgccaagtcagctacgactctttcggcgaggatggcttgctgtacttgggtaagggtggcttgaaagtcatcaaaatccacaaagcggtggtaagcccctgtattaatggtgtaagcacagttggccatgactgaccagttaactgtctggtgaccagggcgcacgagctcggtgtatttaaggcgcgaataggcgcgggtgtcaaagatgtaatcgttgcaggtgcgcaccagatactggtaccctataagaaaatgcggcggtggttggcggtagagaggccatcgttctgtagctggagcgccaggggcgaggtcttccaacataaggcggtgatagccgtagatgtacctggacatccaggtgattcctgcggcggtagtagaagcccgaggaaactcgcgtacgcggttccaaatgttgcgtagcggcatgaagtagttcattgtaggcacggtttgaccagtgaggcgcgcgcagtcattgatgctctatagacacggagaaaatgaaagcgttcagcgactcgactccgtagcctggaggaacgtgaacgggttgggtcgcggtgtaccccggttcgagacttgtactcgagccggccggagccgcggctaacgtggtattggcactcccgtctcgacccagcctacaaaaatccaggatacggaatcgagtcgttttgctggtttccgaatggcagggaagtgagtcctattttttttttttttgccgctcagatgcatcccgtgctgcgacagatgcgcccccaacaacagcccccctcgcagcagcagcagcagcaaccacaaaaggctgtccctgcaactactgcaactgccgccgtgagcggtgcgggacagcccgcctatgatctggacttggaagagggcgaaggactggcacgtctaggtgcgccttcgcccgagcggcatccgcgagttcaactgaaaaaagattctcgcgaggcgtatgtgccccaacagaacctatttagagacagaagcggcgaggagccggaggagatgcgagcttcccgctttaacgcgggtcgtgagctgcgtcacggtttggaccgaagacgagtgttgcgagacgaggatttcgaagttgatgaagtgacagggatcagtcctgccagggcacacgtggctgcagccaaccttgtatcggcttacgagcagacagtaaaggaagagcgtaacttccaaaagtcttttaataatcatgtgcgaaccctgattgcccgcgaagaagttacccttggtttgatgcatttgtgggatttgatggaagctatcattcagaaccctactagcaaacctctgaccgcccagctgtttctggtggtgcaacacagcagagacaatgaggctttcagagaggcgctgctgaacatcaccgaacccgaggggagatggttgtatgatcttatcaacattctacagagtatcatagtgcaggagcggagcctgggcctggccgagaaggtagctgccatcaattactcggttttgagcttgggaaaatattacgctcgcaaaatctacaagactccatacgttcccatagacaaggaggtgaagatagatgggttctacatgcgcatgacgctcaaggtcttgaccctgagcgatgatcttggggtgtatcgcaatgacagaatgcatcgcgcggttagcgccagcaggaggcgcgagttaagcgacagggaactgatgcacagtttgcaaagagctctgactggagctggaaccgagggtgagaattacttcgacatgggagctgacttgcagtggcagcctagtcgcagggctctgagcgccgcgacggcaggatgtgagcttccttacatagaagaggcggatgaaggcgaggaggaagagggcgagtacttggaagactgatggcacaacccgtgttttttgctagatggaacagcaagcaccggatcccgcaatgcgggcggcgctgcagagccagccgtccggcattaactcctcggacgattggacccaggccatgcaacgtatcatggcgttgacgactcgcaaccccgaagcctttagacagcaaccccaggccaaccgtctatcggccatcatggaagctgtagtgccttcccgatctaatcccactcatgagaaggtcctggccatcgtgaacgcgttggtggagaacaaagctattcgtccagatgaggccggactggtatacaacgctctcttagaacgcgtggctcgctacaacagtagcaatgtgcaaaccaatttggaccgtatgataacagatgtacgcgaagccgtgtctcagcgcgaaaggttccagcgtgatgccaacctgggttcgctggtggcgttaaatgctttcttgagtactcagcctgctaatgtgccgcgtggtcaacaggattatactaactttttaagtgctttgagactgatggtatcagaagtacctcagagcgaagtgtatcagtccggtcctgattacttctttcagactagcagacagggcttgcagacggtaaatctgagccaagcttttaaaaaccttaaaggtttgtggggagtgcatgccccggtaggagaaagagcaaccgtgtctagcttgttaactccgaactcccgcctgttattactgttggtagctcctttcaccgacagcggtagcatcgaccgtaattcctatttgggttacctactaaacctgtatcgcgaagccatagggcaaagtcaggtggacgagcagacctatcaagaaattacccaagtcagtcgcgctttgggacaggaagacactggcagtttggaagccactctgaacttcttgcttaccaatcggtctcaaaagatccctcctcaatatgctcttactgcggaggaggagaggatccttagatatgtgcagcagagcgtgggattgtttctgatgcaagagggggcaactccgactgcagcactggacatgacagcgcgaaatatggagcccagcatgtatgccagtaaccgacctttcattaacaaactgctggactacttgcacagagctgccgctatgaactctgattatttcaccaatgccatcttaaacccgcactggctgcccccacctggtttctacacgggcgaatatgacatgcccgaccctaatgacggatttctgtgggacgacgtggacagcgatgttttttcacctctttctgatcatcgcacgtggaaaaaggaaggcggtgatagaatgcattcttctgcatcgctgtccggggtcatgggtgctaccgcggctgagcccgagtctgcaagtccttttcctagtctacccttttctctacacagtgtacgtagcagcgaagtgggtagaataagtcgcccgagtttaatgggcgaagaggagtacctaaacgattccttgctcagaccggcaagagaaaaaaatttcccaaacaatggaatagaaagtttggtggataaaatgagtagatggaagacttatgctcaggatcacagagacgagcctgggatcatggggactacaagtagagcgagccgtagacgccagcgccatgacagacagaggggtcttgtgtgggacgatgaggattcggccgatgatagcagcgtgttggacttgggtgggagaggaaggggcaacccgtttgctcatttgcgccctcgcttgggtggtatgttgtgaaaaaaaataaaaaagaaaaactcaccaaggccatggcgacgagcgtacgttcgttcttctttattatctgtgtctagtataatgaggcgagtcgtgctaggcggagcggtggtgtatccggagggtcctcctccttcgtacgagagcgtgatgcagcagcagcaggcgacggcggtgatgcaatccccactggaggctccctttgtgcctccgcgatacctggcacctacggagggcagaaacagcattcgttactcggaactggcacctcagtacgataccaccaggttgtatctggtggacaacaagtcggcggacattgcttctctgaactatcagaatgaccacagcaacttcttgaccacggtggtgcagaacaatgactttacccctacggaagccagcacccagaccattaactttgatgaacgatcgcggtggggcggtcagctaaagaccatcatgcatactaacatgccaaacgtgaacgagtatatgtttagtaacaagttcaaagcgcgtgtgatggtgtccagaaaacctcccgacggtgctgcagttggggatacttatgatcacaagcaggatattttggaatatgagtggttcgagtttactttgccagaaggcaacttttcagttactatgactattgatttgatgaacaatgccatcatagataattacttgaaagtgggtagacagaatggagtgcttgaaagtgacattggtgttaagttcgacaccaggaacttcaagctgggatgggatcccgaaaccaagttgatcatgcctggagtgtatacgtatgaagccttccatcctgacattgtcttactgcctggctgcggagtggattttaccgagagtcgtttgagcaaccttcttggtatcagaaaaaaacagccatttcaagagggttttaagattttgtatgaagatttagaaggtggtaatattccggccctcttggatgtagatgcctatgagaacagtaagaaagaacaaaaagccaaaatagaagctgctacagctgctgcagaagctaaggcaaacatagttgccagcgactctacaagggttgctaacgctggagaggtcagaggagacaattttgcgccaacacctgttccgactgcagaatcattattggccgatgtgtctgaaggaacggacgtgaaactcactattcaacctgtagaaaaagatagtaagaatagaagctataatgtgttggaagacaaaatcaacacagcctatcgcagttggtatctttcgtacaattatggcgatcccgaaaaaggagtgcgttcctggacattgctcaccacctcagatgtcacctgcggagcagagcaggtttactggtcgcttccagacatgatgaaggatcctgtcactttccgctccactagacaagtcagtaactaccctgtggtgggtgcagagcttatgcccgtcttctcaaagagcttctacaacgaacaagctgtgtactcccagcagctccgccagtccacctcgcttacgcacgtcttcaaccgctttcctgagaaccagattttaatccgtccgccggcgcccaccattaccaccgtcagtgaaaacgttcctgctctcacagatcacgggaccctgccgttgcgcagcagtatccggggagtccaacgtgtgaccgttactgacgccagacgccgcacctgtccctacgtgtacaaggcactgggcatagtcgcaccgcgcgtcctttcaagccgcactttctaaaaaaaaaatgtccattcttatctcgcccagtaataacaccggttggggtctgcgcgctccaagcaagatgtacggaggcgcacgcaaacgttctacccaacatcccgtgcgtgttcgcggacattttcgcgctccatggggtgccctcaagggccgcactcgcgttcgaaccaccgtcgatgatgtaatcgatcaggtggttgccgacgcccgtaattatactcctactgcgcctacatctactgtggatgcagttattgacagtgtagtggctgacgctcgcaactatgctcgacgtaagagccggcgaaggcgcattgccagacgccaccgagctaccactgccatgcgagccgcaagagctctgctacgaagagctagacgcgtggggcgaagagccatgcttagggcggccagacgtgcagcttcgggcgccagcgccggcaggtcccgcaggcaagcagccgctgtcgcagcggcgactattgccgacatggcccaatcgcgaagaggcaatgtatactgggtgcgtgacgctgccaccggtcaacgtgtacccgtgcgcacccgtccccctcgcacttagaagatactgagcagtctccgatgttgtgtcccagcggcgaggatgtccaagcgcaaatacaaggaagaaatgctgcaggttatcgcacctgaagtctacggccaaccgttgaaggatgaaaaaaaaccccgcaaaatcaagcgggttaaaaaggacaaaaaagaagaggaagatggcgatgatgggctggcggagtttgtgcgcgagtttgccccacggcgacgcgtgcaatggcgtgggcgcaaagttcgacatgtgttgagacctggaacttcggtggtctttacacccggcgagcgttcaagcgctacttttaagcgttcctatgatgaggtgtacggggatgatgatattcttgagcaggcggctgaccgattaggcgagtttgcttatggcaagcgtagtagaataacttccaaggatgagacagtgtcaatacccttggatcatggaaatcccacccctagtcttaaaccggtcactttgcagcaagtgttacccgtaactccgcgaacaggtgttaaacgcgaaggtgaagatttgtatcccactatgcaactgatggtacccaaacgccagaagttggaggacgttttggagaaagtaaaagtggatccagatattcaacctgaggttaaagtgagacccattaagcaggtagcgcctggtctgggggtacaaactgtagacattaagattcccactgaaagtatggaagtgcaaactgaacccgcaaagcctactgccacctccactgaagtgcaaacggatccatggatgcccatgcctattacaactgacgccgccggtcccactcgaagatcccgacgaaagtacggtccagcaagtctgttgatgcccaattatgttgtacacccatctattattcctactcctggttaccgaggcactcgctactatcgcagccgaaacagtacctcccgccgtcgccgcaagacacctgcaaatcgcagtcgtcgccgtagacgcacaagcaaaccgactcccggcgccctggtgcggcaagtgtaccgcaatggtagtgcggaacctttgacactgccgcgtgcgcgttaccatccgagtatcatcacttaatcaatgttgccgctgcctccttgcagatatggccctcacttgtcgccttcgcgttcccatcactggttaccgaggaagaaactcgcgccgtagaagagggatgttgggacgcggaatgcgacgctacaggcgacggcgtgctatccgcaagcaattgcggggtggttttttaccagccttaattccaattatcgctgctgcaattggcgcgataccaggcatagcttccgtggcggttcaggcctcgcaacgacattgacattggaaaaaaaacgtataaataaaaaaaaatacaatggactctgacactcctggtcctgtgactatgttttcttagagatggaagacatcaatttttcatccttggctccgcgacacggcacgaagccgtacatgggcacctggagcgacatcggcacgagccaactgaacgggggcgccttcaattggagcagtatctggagcgggcttaaaaattttggctcaaccataaaaacatacgggaacaaagcttggaacagcagtacaggacaggcgcttagaaataaacttaaagaccagaacttccaacaaaaagtagtcgatgggatagcttccggcatcaatggagtggtagatttggctaaccaggctgtgcagaaaaagataaacagtcgtttggacccgccgccagcaaccccaggtgaaatgcaagtggaggaagaaattcctccgccagaaaaacgaggcgacaagcgtccgcgtcccgatttggaagagacgctggtgacgcgcgtagatgaaccgccttcttatgaggaagcaacgaagcttggaatgcccaccactagaccgatagccccaatggccaccggggtgatgaaaccttctcagttgcatcgacccgtcaccttggatttgccccctccccctgctgctactgctgtacccgcttctaagcctgtcgctgccccgaaaccagtcgccgtagccaggtcacgtcccgggggcgctcctcgtccaaatgcgcactggcaaaatactctgaacagcatcgtgggtctaggcgtgcaaagtgtaaaacgccgtcgctgcttttaattaaatatggagtagcgcttaacttgcctatctgtgtatatgtgtcattacacgccgtcacagcagcagaggaaaaaaggaagaggtcgtgcgtcgacgctgagttactttcaagatggccaccccatcgatgctgccccaatgggcatacatgcacatcgccggacaggatgcttcggagtacctgagtccgggtctggtgcagttcgcccgcgccacagacacctacttcaatctgggaaataagtttagaaatcccaccgtagcgccgacccacgatgtgaccaccgaccgtagccagcggctcatgttgcgcttcgtgcccgttgaccgggaggacaatacatactcttacaaagtgcggtacaccctggccgtgggcgacaacagagtgctggatatggccagcacgttctttgacattaggggcgtgttggacagaggtcccagtttcaaaccctattctggtacggcttacaactctctggctcctaaaggcgctccaaatgcatctcaatggattgcaaaaggcgtaccaactgcagcagccgcaggcaatggtgaagaagaacatgaaacagaggagaaaactgctacttacacttttgccaatgctcctgtaaaagccgaggctcaaattacaaaagagggcttaccaataggtttggagatttcagctgaaaacgaatctaaacccatctatgcagataaactttatcagccagaacctcaagtgggagatgaaacttggactgacctagacggaaaaaccgaagagtatggaggcagggctctaaagcctactactaacatgaaaccctgttacgggtcctatgcgaagcctactaatttaaaaggtggtcaggcaaaaccgaaaaactcggaaccgtcgagtgaaaaaattgaatatgatattgacatggaattttttgataactcatcgcaaagaacaaacttcagtcctaaaattgtcatgtatgcagaaaatgtaggtttggaaacgccagacactcatgtagtgtacaaacctggaacagaagacacaagttccgaagctaatttgggacaacagtctatgcccaacagacccaactacattggcttcagagataactttattggactcatgtactataacagtactggtaacatgggggtgctggctggtcaagcgtctcagttaaatgcagtggttgacttgcaggacagaaacacagaactttcttaccaactcttgcttgactctctgggcgacagaaccagatactttagcatgtggaatcaggctgtggacagttatgatcctgatgtacgtgttattgaaaatcatggtgtggaagatgaacttcccaactattgttttccactggacggcataggtgttccaacaaccagttacaaatcaatagttccaaatggagaagataataataattggaaagaacctgaagtaaatggaacaagtgagatcggacagggtaatttgtttgccatggaaattaaccttcaagccaatctatggcgaagtttcctttattccaatgtggctctgtatctcccagactcgtacaaatacaccccgtccaatgtcactcttccagaaaacaaaaacacctacgactacatgaacgggcgggtggtgccgccatctctagtagacacctatgtgaacattggtgccaggtggtctctggatgccatggacaatgtcaacccattcaaccaccaccgtaacgctggcttgcgttaccgatctatgcttctgggtaacggacgttatgtgcctttccacatacaagtgcctcaaaaattcttcgctgttaaaaacctgctgcttctcccaggctcctacacttatgagtggaactttaggaaggatgtgaacatggttctacagagttccctcggtaacgacctgcgggtagatggcgccagcatcagtttcacgagcatcaacctctatgctacttttttccccatggctcacaacaccgcttccacccttgaagccatgctgcggaatgacaccaatgatcagtcattcaacgactacctatctgcagctaacatgctctaccccattcctgccaatgcaaccaatattcccatttccattccttctcgcaactgggcggctttcagaggctggtcatttaccagactgaaaaccaaagaaactccctctttggggtctggatttgacccctactttgtctattctggttctattccctacctggatggtaccttctacctgaaccacacttttaagaaggtttccatcatgtttgactcttcagtgagctggcctggaaatgacaggttactatctcctaacgaatttgaaataaagcgcactgtggatggcgaaggctacaacgtagcccaatgcaacatgaccaaagactggttcttggtacagatgctcgccaactacaacatcggctatcagggcttctacattccagaaggatacaaagatcgcatgtattcatttttcagaaacttccagcccatgagcaggcaggtggttgatgaggtcaattacaaagacttcaaggccgtcgccataccctaccaacacaacaactctggctttgtgggttacatggctccgaccatgcgccaaggtcaaccctatcccgctaactatccctatccactcattggaacaactgccgtaaatagtgttacgcagaaaaagttcttgtgtgacagaaccatgtggcgcataccgttctcgagcaacttcatgtctatgggggcccttacagacttgggacagaatatgctctatgccaactcagctcatgctctggacatgacctttgaggtggatcccatggatgagcccaccctgctttatcttctcttcgaagttttcgacgtggtcagagtgcatcagccacaccgcggcatcatcgaggcagtctacctgcgtacaccgttctcggccggtaacgctaccacgtaagaagcttcttgcttcttgcaaatagcagctgcaaccatggcctgcggatcccaaaacggctccagcgagcaagagctcagagccattgtccaagacctgggttgcggaccctattttttgggaacctacgataagcgcttcccggggttcatggcccccgataagctcgcctgtgccattgtaaatacggccggacgtgagacggggggagagcactggttggctttcggttggaacccacgttctaacacctgctacctttttgatccttttggattctcggatgatcgtctcaaacagatttaccagtttgaatatgagggtctcctgcgccgcagcgctcttgctaccaaggaccgctgtattacgctggaaaaatctacccagaccgtgcagggcccccgttctgccgcctgcggacttttctgctgcatgttccttcacgcctttgtgcactggcctgaccgtcccatggacggaaaccccaccatgaaattgctaactggagtgccaaacaacatgcttcattctcctaaagtccagcccaccctgtgtgacaatcaaaaagcactctaccattttcttaatacccattcgccttattttcgctctcatcgtacacacatcgaaagggccactgcgttcgaccgtatggatgttcaataatgactcatgtaaacaacgtgttcaataaacatcactttatttttttacatgtatcaaggctctggattacttatttatttacaagtcgaatgggttctgacgagaatcagaatgacccgcaggcagtgatacgttgcggaactgatacttgggttgccacttgaattcgggaatcaccaacttgggaaccggtatatcgggcaggatgtcactccacagctttctggtcagctgcaaagctccaagcaggtcaggagccgaaatcttgaaatcacaattaggaccagtgctctgagcgcgagagttgcggtacaccggattgcagcactgaaacaccatcagcgacggatgtctcacgcttgccagcacggtgggatctgcaatcatgcccacatccagatcttcagcattggcaatgctgaacggggtcatcttgcaggtctgcctacccatggcgggcacccaattaggcttgtggttgcaatcgcagtgcagggggatcagtatcatcttggcctgatcctgtctgattcctggatacacggctctcatgaaagcatcatattgcttgaaagcctgctgggctttactaccctcggtataaaacatcccgcaggacctgctcgaaaactggttagctgcacagccggcatcattcacacagcagcgggcgtcattgttggctatttgcaccacacttctgccccagcggttttgggtgattttggttcgctcgggattctcctttaaggctcgttgtccgttctcgctggccacatccatctcgataatctgctccttctgaatcataatattgccatgcaggcacttcagcttgccctcataatcattgcagccatgaggccacaacgcacagcctgtacattcccaattatggtgggcgatctgagaaaaagaatgtatcattccctgcagaaatcttcccatcatcgtgctcagtgtcttgtgactagtgaaagttaactggatgcctcggtgctcttcgtttacgtactggtgacagatgcgcttgtattgttcgtgttgctcaggcattagtttaaaacaggttctaagttcgttatccagcctgtacttctccatcagcagacacatcacttccatgcctttctcccaagcagacaccaggggcaagctaatcggattcttaacagtgcaggcagcagctcctttagccagagggtcatctttagcgatcttctcaatgcttcttttgccatccttctcaacgatgcgcacgggcgggtagctgaaacccactgctacaagttgcgcctcttctctttcttcttcgctgtcttgactgatgtcttgcatggggatatgtttggtcttccttggcttctttttggggggtatcggaggaggaggactgtcgctccgttccggagacagggaggattgtgacgtttcgctcaccattaccaactgactgtcggtagaagaacctgaccccacacggcgacaggtgtttttcttcgggggcagaggtggaggcgattgcgaagggctgcggtccgacctggaaggcggatgactggcagaaccccttccgcgttcgggggtgtgctccctgtggcggtcgcttaactgatttccttcgcggctggccattgtgttctcctaggcagagaaacaacagacatggaaactcagccattgctgtcaacatcgccacgagtgccatcacatctcgtcctcagcgacgaggaaaaggagcagagcttaagcattccaccgcccagtcctgccaccacctctaccctagaagataaggaggtcgacgcatctcatgacatgcagaataaaaaagcgaaagagtctgagacagacatcgagcaagacccgggctatgtgacaccggtggaacacgaggaagagttgaaacgctttctagagagagaggatgaaaactgcccaaaacagcgagcagataactatcaccaagatgctggaaatagggatcagaacaccgactacctcatagggcttgacggggaagacgcgctccttaaacatctagcaagacagtcgctcatagtcaaggatgcattattggacagaactgaagtgcccatcagtgtggaagagctcagctgcgcctacgagcttaaccttttttcacctcgtactccccccaaacgtcagccaaacggcacctgcgagccaaatcctcgcttaaacttttatccagcttttgctgtgccagaagtactggctacctatcacatcttttttaaaaatcaaaaaattccagtctcctgccgcgctaatcgcacccgcgccgatgccctactcaatctgggacctggttcacgcttacctgatatagcttccttggaagaggttccaaagatcttcgagggtctgggcaataatgagactcgggccgcaaatgctctgcaaaagggagaaaatggcatggatgagcatcacagcgttctggtggaattggaaggcgataatgccagactcgcagtactcaagcgaagcgtcgaggtcacacacttcgcatatcccgctgtcaacctgccccctaaagtcatgacggcggtcatggaccagttactcattaagcgcgcaagtcccctttcagaagacatgcatgacccagatgcctgtgatgagggtaaaccagtggtcagtgatgagcagctaacccgatggctgggcaccgactctccccgggatttggaagagcgtcgcaagcttatgatggccgtggtgctggttaccgtagaactagagtgtctccgacgtttctttaccgattcagaaaccttgcgcaaactcgaagagaatctgcactacacttttagacacggctttgtgcggcaggcatgcaagatatctaacgtggaactcaccaacctggtttcctacatgggtattctgcatgagaatcgcctaggacaaagcgtgctgcacagcacccttaagggggaagcccgccgtgattacatccgcgattgtgtctatctctacctgtgccacacgtggcaaaccggcatgggtgtatggcagcaatgtttagaagaacagaacttgaaagagcttgacaagctcttacagaaatctcttaaggttctgtggacagggttcgacgagcgcaccgtcgcttccgacctggcagacctcatcttcccagagcgtctcagggttactttgcgaaacggattgcctgactttatgagccagagcatgcttaacaattttcgctctttcatcctggaacgctccggtatcctgcccgccacctgctgcgcactgccctccgactttgtgcctctcacctaccgcgagtgccccccgccgctatggagtcactgctacctgttccgtctggccaactatctctcctaccactcggatgtgatcgaggatgtgagcggagacggcttgctggagtgccactgccgctgcaatctgtgcacgccccaccggtccctagcttgcaacccccagttgatgagcgaaacccagataataggcacctttgaattgcaaggccccagcagccaaggcgatgggtcttctcctgggcaaagtttaaaactgaccccgggactgtggacctccgcctacttgcgcaagtttgctccggaagattaccacccctatgaaatcaagttctatgaggaccaatcacagcctccaaaggccgaactttcggcttgcgtcatcacccagggggcaattctggcccaattgcaagccatccaaaaatcccgccaagaatttctactgaaaaagggtaagggggtctaccttgacccccagaccggcgaggaactcaacacaaggttccctcaggatgtcccaacgacgagaaaacaagaagttgaaggtgcagccgccgcccccagaagatatggaggaagattgggacagtcaggcagaggaggcggaggaggacagtctggaggacagtctggaggaagacagtttggaggaggaaaacgaggaggcagaggaggtggaagaagtaaccgccgacaaacagttatcctcggctgcggagacaagcaacagcgctaccatctccgctccgagtcgaggaacccggcggcgtcccagcagtagatgggacgagaccggacgcttcccgaacccaaccagcgcttccaagaccggtaagaaggatcggcagggatacaagtcctggcgggggcataagaatgccatcatctcctgcttgcatgagtgcgggggcaacatatccttcacgcggcgctacttgctattccaccatggggtgaactttccgcgcaatgttttgcattactaccgtcacctccacagcccctactatagccagcaaatcccgacagtctcgacagataaagacagcggcggcgacctccaacagaaaaccagcagcggcagttagaaaatacacaacaagtgcagcaacaggaggattaaagattacagccaacgagccagcgcaaacccgagagttaagaaatcggatctttccaaccctgtatgccatcttccagcagagtcggggtcaagagcaggaactgaaaataaaaaaccgatctctgcgttcgctcaccagaagttgtttgtatcacaagagcgaagatcaacttcagcgcactctcgaggacgccgaggctctcttcaacaagtactgcgcgctgactcttaaagagtaggcagcgaccgcgcttattcaaaaaaggcgggaattacatcatcctcgacatgagtaaagaaattcccacgccttacatgtggagttatcaaccccaaatgggattggcagcaggcgcctcccaggactactccacccgcatgaattggctcagcgccgggccttctatgatttctcgagttaatgatatacgcgcctaccgaaaccaaatacttttggaacagtcagctcttaccaccacgccccgccaacaccttaatcccagaaattggcccgccgccctagtgtaccaggaaagtcccgctcccaccactgtattacttcctcgagacgcccaggccgaagtccaaatgactaatgcaggtgcgcagttagctggcggctccaccctatgtcgtcacaggcctcggcataatataaaacgcctgatgatcagaggccgaggtatccagctcaacgacgagtcggtgagctctccgcttggtctacgaccagacggaatctttcagattgccggctgcgggagatcttccttcacccctcgtcaggctgttctgactttggaaagttcgtcttcgcaaccccgctcgggcggaatcgggaccgttcaatttgtagaggagtttactccctctgtctacttcaaccccttctccggatctcctgggcactacccggacgagttcataccgaacttcgacgcgattagcgagtcagtggacggctacgattgatgtctggtgacgcggctgagctatctcggctgcgacatctagaccactgccgccgctttcgctgctttgcccgggaacttattgagttcatctacttcgaactccccaaggatcaccctcaaggtccggcccacggagtgcggattactatcgaaggcaaaatagactctcgcctgcaacgaattttctcccagcggcccgtgctgatcgagcgagaccagggaaacaccacggttagtaatcaattacggggtcattagttcatagcccatatatggagttaacttgtttattgcagcttataatggttacaaataaagcaatagcatcacaaatttcacaaataaagcatttttttcactgcattctagttgtggtttgtccaaactcatcaatgtatcttatcatgtctgctcgaagcggccggccgccccgactctagagtcgcggcctcattaggaagttcctatactttctagagaataggaacttctcagaagaactcgtcaagaaggcgatagaaggcgatgcgctgcgaatcgggagcggcgataccgtaaagcacgaggaagcggtcagcccattcgccgccaagctcttcagcaatatcacgggtagccaacgctatgtcctgatagcggtccgccacacccagccggccacagtcgatgaatccagaaaagcggccattttccaccatgatattcggcaagcaggcatcgccatgggtcacgacgagatcctcgccgtcgggcatgcgcgccttgagcctggcgaacagttcggctggcgcgagcccctgatgctcttcgtccagatcatcctgatcgacaagaccggcttccatccgagtacgtgctcgctcgatgcgatgtttcgcttggtggtcgaatgggcaggtagccggatcaagcgtatgcagccgccgcattgcatcagccatgatggatactttctcggcaggagcaaggtgagatgacaggagatcctgccccggcacttcgcccaatagcagccagtcccttcccgcttcagtgacaacgtcgagcacagctgcgcaaggaacgcccgtcgtggccagccacgatagccgcgctgcctcgtcctgcagttcattcagggcaccggacaggtcggtcttgacaaaaagaaccgggcgcccctgcgctgacagccggaacacggcggcatcagagcagccgattgcctgttgtgcccagtcatagccgaatagcctctccacccaagcggccggagaacctgcgtgcaatccatcttgttcaatggccgatcccataacaccccttgtattactgtttatgtaagcagacagttttactgttcgtgatgatatatttttatcttgtgcaatgtaacaggttgtggccatagcgggcccgggattttcctccacgtccccgcatgttagaagacttcccctgccctcggctctggaagttcctatactttctagagaataggaacttcccgccagaatgcgttcgcacagccgccagccggtcactccgttgatggttactcggaacagcagggagccgtcggggttgatcaggcgctcgtcgataattttgttgccgttccacagggtccctgttacagtgatctttttgccgtcgaacacggcgatgccttcatacggccgtccgaaatagtcgatcatgttcggcgtaaccccgtcgattaccagtgtgccatagtgcaggatcaccttaaagtgatgatcatccacagggtacaccaccttaaaaattttttcgatctggcccatttggtcgccgctcagaccttcatacgggatgatgacatggatgtcgatcttcagcccattttcaccgctcaggacaatcctttggatcggagttacggacaccccgagattctgaaacaaactggacacacctccctgttcaaggacttggtccaggttgtagccggctgtctgtcgccagtccccaacgaaatcttcgagtgtgaagaccatggatccgggcccggggttttcttcaacgtctccagcctgcttcagcaggctgaagttagtagctccgcttcctcgagctcgagatctggcgaaggcgatgggggtcttgaaggcgtgctggtactccacgatgcccagctcggtgttgctgtgcagctcctccacgcggcggaaggcgaacatggggcccccgttctgcaggatgctggggtggatggcgctcttgaagtgcatgtggctgtccaccacgaagctgtagtagccgccgtcgcgcaggctgaaggtgcgggcgaagctgcccaccagcacgttatcgcccatggggtgcaggtgctccacggtggcgttgctgcggatgatcttgtcggtgaagatcacgctgtcctcggggaagccggtgcccaccaccttgaagtcgccgatcacgcggccggcctcgtagcggtagctgaagctcacgtgcagcacgccgccgtcctcgtacttctcgatgcgggtgttggtgtagccgccgttgttgatggcgtgcaggaaggggttctcgtagccgctggggtaggtgccgaagtggtagaagccgtagcccatcacgtggctcagcaggtaggggctgaaggtcagggcgcctttggtgctcttcatcttgttggtcatgcggccctgctcgggggtgccctctccgccgcccaccagctcgaactccacgccgttcagggtgccggtgatgcggcactcgatcttcatggcgggcatggtggcgaccggtagcgctagcggcttcggtaccacgcgttcgctcgaattaatcaattctttgccaaaatgatgagacagcacaataaccagcacgttgcccaggagctgtaggaaaaagaagaaggcatgaacatggttagcagaggctctagagccgccggtcacacgccagaagccgaaccccgccctgccccgtcccccccgaaggcagccgtccccccgcggacagccccgaggctggagagggagaaggggacggcggcgcggcgacgcacgaaggccctccccgcccatttccttcctgccggggccctcccggagcccctcaaggctttcacgcagccacagaaaagaaacaagccgtcattaaaccaagcgctaattacagcccggaggagaagggccgtcccgcccgctcacctgtgggagtaacgcggtcagtcagagccggggcgggcggcgcgaggcggcgcggagcggggcacggggcgaaggcaacgcagcgactcccgcccgccgcgcgcttcgctttttatagggccgccgccgccgccgcctcgccataaaaggaaactttcggagcgcgccgctctgattggctgccgccgcacctctccgcctcgccccgccccgcccctcgccccgccccgccccgcctggcgcgcgccccccccccccccccgcccccatcgctgcacaaaataattaaaaaataaataaatacaaaattgggggtggggaggggggggagatggggagagtgaagcagaacgtggggctcacctcgaccatggtaatagcgatgactaatacgtagatgtactgccaagtaggaaagtcccataaggtcatgtactgggcataatgccaggcgggccatttaccgtcattgacgtcaatagggggcgtacttggcatatgatacacttgatgtactgccaagtgggcagtttaccgtaaatactccacccattgacgtcaatggaaagtccctattggcgttactatgggaacatacgtcattattgacgtcaatgggcgggggtcgttgggcggtcagccaggcgggccatttaccgtaagttatgtaacgcggaacaacaacaattgcattcattttatgtttcaggttcagggggaggtgtggtcctgcgattccatcgagtgcacctacaccctgctgaagaccctatgcggcctaagagacctgctaccaatgaattaaaaaaaaatgattaataaaaaatcacttacttgaaatcagcaataaggtctctgttgaaattttctcccagcagcacctcacttccctcttcccaactctggtattctaaaccccgttcagcggcatactttctccatactttaaaggggatgtcaaattttagctcctctcctgtacccacaatcttcatgtctttcttcccagatgaccaagagagtccggctcagtgactccttcaaccctgtctacccctatgaagatgaaagcacctcccaacacccctttataaacccagggtttatttccccaaatggcttcacacaaagcccagacggagttcttactttaaaatgtttaaccccactaacaaccacaggcggatctctacagctaaaagtgggagggggacttacagtggatgacactgatggtaccttacaagaaaacatacgtgctacagcacccattactaaaaataatcactctgtagaactatccattggaaatggattagaaactcaaaacaataaactatgtgccaaattgggaaatgggttaaaatttaacaacggtgacatttgtataaaggatagtattaacaccttatggactggaataaaccctccacctaactgtcaaattgtggaaaacactaatacaaatgatggcaaacttactttagtattagtaaaaaatggagggcttgttaatggctacgtgtctctagttggtgtatcagacactgtgaaccaaatgttcacacaaaagacagcaaacatccaattaagattatattttgactcttctggaaatctattaactgaggaatcagacttaaaaattccacttaaaaataaatcttctacagcgaccagtgaaactgtagccagcagcaaagcctttatgccaagtactacagcttatcccttcaacaccactactagggatagtgaaaactacattcatggaatatgttactacatgactagttatgatagaagtctatttcccttgaacatttctataatgctaaacagccgtatgatttcttccaatgttgcctatgccatacaatttgaatggaatctaaatgcaagtgaatctccagaaagcaacatagctacgctgaccacatccccctttttcttttcttacattacagaagacgacaactaaaataaagtttaagtgtttttatttaaaatcacaaaattcgagtagttattttgcctccaccttcccatttgacagaatacacagtcctttctccccggctggccttaaaaagcatcatatcatgggtaacagacatattcttaggtgttatattccacacggtttcctgtcgagccaaacgctcatcagtgatattaataaactccccgggcagctcacttaagttcatgtcgctgtccagctgctgagccacaggctgctgtccaacttgcggttgcttaacgggcggcgaaggagaagtccacgcctacatgggggtagagtcataatcgtgcatcaggatagggcggtggtgctgcagcagcgcgcgaataaactgctgccgccgccgctccgtcctgcaggaatacaacatggcagtggtctcctcagcgatgattcgcaccgcccgcagcataaggcgccttgtcctccgggcacagcagcgcaccctgatctcacttaaatcagcacagtaactgcagcacagcaccacaatattgttcaaaatcccacagtgcaaggcgctgtatccaaagctcatggcggggaccacagaacccacgtggccatcataccacaagcgcaggtagattaagtggcgacccctcataaacacgctggacataaacattacctcttttggcatgttgtaattcaccacctcccggtaccatataaacctctgattaaacatggcgccatccaccaccatcctaaaccagctggccaaaacctgcccgccggctatacactgcagggaaccgggactggaacaatgacagtggagagcccaggactcgtaaccatggatcatcatgctcgtcatgatatcaatgttggcacaacacaggcacacgtgcatacacttcctcaggattacaagctcctcccgcgttagaaccatatcccagggaacaacccattcctgaatcagcgtaaatcccacactgcagggaagacctcgcacgtaactcacgttgtgcattgtcaaagtgttacattcgggcagcagcggatgatcctccagtatggtagcgcgggtttctgtctcaaaaggaggtagacgatccctactgtacggagtgcgccgagacaaccgagatcgtgttggtcgtagtgtcatgccaaatggaacgccggacgtagtcattctcgtattttgtatagcaaaacgcggccctggcagaacacactcttcttcgccttctatcctgccgcttagcgtgttccgtgtgatagttcaagtacagccacactcttaagttggtcaaaagaatgctggcttcagttgtaatcaaaactccatcgcatctaattgttctgaggaaatcatccacggtagcatatgcaaatcccaaccaagcaatgcaactggattgcgtttcaagcaggagaggagagggaagagacggaagaaccatgttaatttttattccaaacgatctcgcagtacttcaaattgtagatcgcgcagatggcatctctcgcccccactgtgttggtgaaaaagcacagctaaatcaaaagaaatgcgattttcaaggtgctcaacggtggcttccaacaaagcctccacgcgcacatccaagaacaaaagaataccaaaagaaggagcattttctaactcctcaatcatcatattacattcctgcaccattcccagataattttcagctttccagccttgaattattcgtgtcagttcttgtggtaaatccaatccacacattacaaacaggtcccggagggcgccctccaccaccattcttaaacacaccctcataatgacaaaatatcttgctcctgtgtcacctgtagcgaattgagaatggcaacatcaattgacatgcccttggctctaagttcttctttaagttctagttgtaaaaactctctcatattatcaccaaactgcttagccagaagccccccgggaacaagagcaggggacgctacagtgcagtacaagcgcagacctccccaattggctccagcaaaaacaagattggaataagcatattgggaaccaccagtaatatcatcgaagttgctggaaatataatcaggcagagtttcttgtagaaattgaataaaagaaaaatttgccaaaaaaacattcaaaacctctgggatgcaaatgcaataggttaccgcgctgcgctccaacattgttagttttgaattagtctgcaaaaataaaaaaaaaacaagcgtcatatcatagtagcctgacgaacaggtggataaatcagtctttccatcacaagacaagccacagggtctccagctcgaccctcgtaaaacctgtcatcgtgattaaacaacagcaccgaaagttcctcgcggtgaccagcatgaataagtcttgatgaagcatacaatccagacatgttagcatcagttaaggagaaaaaacagccaacatagcctttgggtataattatgcttaatcgtaagtatagcaaagccacccctcgcggatacaaagtaaaaggcacaggagaataaaaaatataattatttctctgctgctgtttaggcaacgtcgcccccggtccctctaaatacacatacaaagcctcatcagccatggcttaccagagaaagtacagcgggcacacaaaccacaagctctaaagtcactctccaacctctccacaatatatatacacaagccctaaactgacgtaatgggactaaagtgtaaaaaatcccgccaaacccaacacacaccccgaaactgcgtcaccagggaaaagtacagtttcacttccgcaatcccaacaagcgtcacttcctctttctcacggtacgtcacatcccattaacttacaacgtcattttcccacggccgcgccgccccttttaaccgttaaccccacagccaatcaccacacggcccacactttttaaaatcacctcatttacatattggcaccattccatctataaggtatattattgatgatggccaagctatttaggtgacactatagaatactcaagctatgcatcaagcttggtaccgagctcggatccactagtaacggccgccagtgtgctggaattcgcccttgtttaaacgcgatcgcttgagatcgttttggtctgcgcgtaatctcttgctctgaaaacgaaaaaaccgccttgcagggcggtttttcgaaggttctctgagctaccaactctttgaaccgaggtaactggcttggaggagcgcagtcaccaaaacttgtcctttcagtttagccttaaccggcgcatgacttcaagactaactcctctaaatcaattaccagtggctgctgccagtggtgcttttgcatgtctttccgggttggactcaagacgatagttaccggataaggcgcagcggtcggactgaacggggggttcgtgcatacagtccagcttggagcgaactgcctacccggaactgagtgtcaggcgtggaatgagacaaacgcggccataacagcggaatgacaccggtaaaccgaaaggcaggaacaggagagcgcacgagggagccgccagggggaaacgcctggtatctttatagtcctgtcgggtttcgccaccactgatttgagcgtcagatttcgtgatgcttgtcaggggggcggagcctatggaaaaacggctttgccgcggccctctcacttccctgttaagtatcttcctggcatcttccaggaaatctccgccccgttcgtaagccatttccgctcgccgcagtcgaacgaccgagcgtagcgagtcagtgagcgaggaagcggaatatatcctgtatcacatattctgctgacgcaccggtgcagccttttttctcctgccacatgaagcacttcactgacaccctcatcagtgccaacatagtaagccagtatacactccgctagcgcgatcgcttaattaatttaaatcctgcagggtttaaacggccggcctagggataacagggtaatcgtaactataacggtcctaaggtagcgaatgatgtccggcggtgcttttgccgttacgcaccaccccgtcagtagctgaacaggagggacagctgatagaaacagaagccactggagcacctcaaaaacaccatcatacactaaatcagtaagttggcagcatcacccgacgcactttgcgccgaataaatacctgtgacggaagatcacttcgcagaataaataaatcctggtgtccctgttgataccgggaagccctgggccaacttttggcgaaaatgagacgttgatcggcacgtaagaggttccaactttcaccataatgaaataagatcactaccgggcgtattttttgagttatcgagattttcaggagctaaggaagctaaaatggagaaaaaaatcactggatataccaccgttgatatatcccaatggcatcgtaaagaacattttgaggcatttcagtcagttgctcaatgtacctataaccagaccgttcagctggatattacggcctttttaaagaccgtaaagaaaaataagcacaagttttatccggcctttattcacattcttgcccgcctgatgaatgctcatccggaattccgtatggcaatgaaagacggtgagctggtgatatgggatagtgttcacccttgttacaccgttttccatgagcaaactgaaacgttttcatcgctctggagtgaataccacgacgatttccggcagtttctacacatatattcgcaagatgtggcgtgttacggtgaaaacctggcctatttccctaaagggtttattgagaatatgtttttcgtctcagccaatccctgggtgagtttcaccagttttgatttaaacgtggccaatatggacaacttcttcgcccccgttttcaccatgggcaaatattatacgcaaggcgacaaggtgctgatgccgctggcgattcaggttcatcatgccgtctgtgatggcttccatgtcggcagaatgcttaatgaattacaacagtactgcgatgagtggcagggcggggcgtaacctgcaggttaattaaggaagggcgaattctgcagatatccatcacactggcggccgctcgagcatgcatctagagggcccaattcgccctatagtgagtcgtattacaattcactggcc

SEQ ID NO: 58 - DNA, 34971 bp, Artificial Sequence
  PS3
catcatcaataatataccttatagatggaatggtgccaatatgtaaatgaggtgattttaaaaagtgtgggccgtgtggtgattggctgtggggttaacggttaaaaggggcggcgcggccgtgggaaaatgacgttttatgggggtggagtttataacttcgtatagcatacattatacgaagttatttttgcaagttgtcgcgggaaatgttacgcataaaaaggcttcttttctcacggaactacttagttttcccacggtatttaacaggaaatgaggtagttttgaccggatgcaagtgaaaattgctgattttcgcgcgaaaactgaatgaggaagtgtttttctgaataatgtggtatttatggcagggtggagtatttgttcagggccaggtagactttgacccattacgtggaggtttcgattaccgtgttttttacctgaatttccgcgtaccgtgtcaaagtcttctgtttttacgtaggtgtcagctgatcgctagggtatttataacttcgtatagcatacattatacgaagttatggaatgtttatgccttaccagtgtaacatgaatcatgtgaaagtgttgttggaaccagatgccttttccagaatgagcctaacaggaatctttgacatgaacacgcaaatctggaagatcctgaggtatgatgatacgagatcgagggtgcgcgcatgcgaatgcggaggcaagcatgccaggttccagccggtgtgtgtagatgtgaccgaagatctcagaccggatcatttggttattgcccgcactggagcagagttcggatccagtggagaagaaactgactaaggtgagtattgggaaaactttggggtgggattttcagatggacagattgagtaaaaatttgttttttctgtcttgcagctgacatgagtggaaatgcttcttttaaggggggagtcttcagcccttatctgacagggcgtctcccatcctgggcaggagttcgtcagaatgttatgggatctactgtggatggaagacccgttcaacccgccaattcttcaacgctgacctatgctactttaagttcttcacctttggacgcagctgcagccgctgccgccgcctctgtcgccgctaacactgtgcttggaatgggttactatggaagcatcgtggctaattccacttcctctaataacccttctacactgactcaggacaagttacttgtccttttggcccagctggaggctttgacccaacgtctgggtgaactttctcagcaggtggccgagttgcgagtacaaactgagtctgctgtcggcacggcaaagtctaaataaaaaaaattccagaatcaatgaataaataaacgagcttgttgttgatttaaaatcaagtgtttttatttcatttttcgcgcacggtatgccctggaccaccgatctcgatcattgagaactcggtggattttttccagaatcctatagaggtgggattgaatgtttagatacatgggcattaggccgtctttggggtggagatagctccattgaagggattcatgctccggggtagtgttgtaaatcacccagtcataacaaggtcgcagtgcatggtgttgcacaatatcttttagaagtaggctgattgccacagataagcccttggtgtaggtgtttacaaaccggttgagctgggaggggtgcattcgaggtgaaattatgtgcattttggattggatttttaagttggcaatattgccgccaagatcccgtcttgggttcatgttatgaaggactaccaagacggtgtatccggtacatttaggaaatttatcgtgcagcttggatggaaaagcgtggaaaaatttggagacacccttgtgtcctccgagattttccatgcactcatccatgataatagcaatggggccgtgggcagcggcgcgggcaaacacgttccgtgggtctgacacatcatagttatgttcctgagttaaatcatcataagccattttaatgaatttggggcggagcgtaccagattggggtatgaatgttccttcgggccccggagcatagttcccctcacagatttgcatttcccaagctttcagttctgagggtggaatcatgtccacctggggggctatgaagaacaccgtttcgggggcgggggtgattagttgggatgatagcaagtttctgagcaattgagatttgccacatccggtggggccataaataattccgattacaggttgcaggtggtagtttagggaacggcaactgccgtcttctcgaagcaagggggccacctcgttcatcatttcccttacatgcatattttcccgcaccaaatccattaggaggcgctctcctcctagtgatagaagttcttgtagtgaggaaaagtttttcagcggttttagaccgtcagccatgggcattttggaaagagtttgctgcaaaagttctagtctgttccacagttcagtgatgtgttctatggcatctcgatccagcagacctcctcgtttcgcgggtttggacggctcctggagtagggtatgagacgatgggcgtccagcgctgccagggttcggtccttccagggtctcagtgttcgagtcagggttgtttccgtcacagtgaaggggtgtgcgcctgcttgggcgcttgccagggtgcgcttcagactcattctgctggtggagaacttctgtcgcttggcgccctgtatgtcggccaagtagcagtttaccatgagttcgtagttgagcgcctcggctgcgtggcctttggcgcggagcttacctttggaagttttcttgcataccgggcagtataggcatttcagcgcatacagcttgggcgcaaggaaaatggattctggggagtatgcatccgcgccgcaggaggcgcaaacagtttcacattccaccagccaggttaaatccggttcattggggtcaaaaacaagttttccgccatattttttgatgcgtttcttacctttggtctccataagttcgtgtcctcgttgagtgacaaacaggctgtccgtatctccgtagactgattttacaggcctcttctccagtggagtgcctcggtcttcttcgtacaggaactctgaccactctgatacaaaggcgcgcgtccaggccagcacaaaggaggctatgtgggaggggtagcgatcgttgtcaaccagggggtccaccttttccaaagtatgcaaacacatgtcaccctcttcaacatccaggaatgtgattggcttgtaggtgtatttcacgtgacctggggtccccgctgggggggtataaaagggggcggttctttgctcttcctcactgtcttccggatcgctgtccaggaacgtcagctgttggggtaggtattccctctcgaaggcgggcatgacctctgcactcaggttgtcagtttctaagaacgaggaggatttgatattgacagtgccggttgagatgcctttcatgaggttttcgtccatttggtcagaaaacacaatttttttattgtcaagtttggtggcaaatgatccatacagggcgttggataaaagtttggcaatggatcgcatggtttggttcttttccttgtccgcgcgctctttggcggcgatgttgagttggacatactcgcgtgccaggcacttccattcggggaagatagttgttaattcatctggcacgattctcacttgccaccctcgattatgcaaggtaattaaatccacactggtggccacctcgcctcgaaggggttcattggtccaacagagcctacctcctttcctagaacagaaagggggaagtgggtctagcataagttcatcgggagggtctgcatccatggtaaagattcccggaagtaaatccttatcaaaatagctgatgggagtggggtcatctaaggccatttgccattctcgagctgccagtgcgcgctcatatgggttaaggggactgccccagggcatgggatgggtgagagcagaggcatacatgccacagatgtcatagacgtagatgggatcctcaaagatgcctatgtaggttggatagcatcgcccccctctgatacttgctcgcacatagtcatatagttcatgtgatggcgctagcagccccggacccaagttggtgcgattgggtttttctgttctgtagacgatctggcgaaagatggcgtgagaattggaagagatggtgggtctttgaaaaatgttgaaatgggcatgaggtagacctacagagtctctgacaaagtgggcataagattcttgaagcttggttaccagttcggcggtgacaagtacgtctagggcgcagtagtcaagtgtttcttgaatgatgtcataacctggttggtttttcttttcccacagttcgcggttgagaaggtattcttcgcgatccttccagtactcttctagcggaaacccgtctttgtctgcacggtaagatcctagcatgtagaactgattaactgccttgtaagggcagcagcccttctctacgggtagagagtatgcttgagcagcttttcgtagcgaagcgtgagtaagggcaaaggtgtctctgaccatgactttgagaaattggtatttgaagtccatgtcgtcacaggctccctgttcccagagttggaagtctacccgtttcttgtaggcggggttgggcaaagcgaaagtaacatcattgaagagaatcttaccggctctgggcataaaattgcgagtgatgcggaaaggctgtggtacttccgctcgattgttgatcacctgggcagctaggacgatttcgtcgaaaccgttgatgttgtgtcctacgatgtataattctatgaaacgcggcgtgcctctgacgtgaggtagcttactgagctcatcaaaggttaggtctgtggggtcagataaggcgtagtgttcgagagcccattcgtgcaggtgaggatttgcatgtaggaatgatgaccaaagatctaccgccagtgctgtttgtaactggtcccgatactgacgaaaatgccggccaattgccattttttctggagtgacacagtagaaggttctggggtcttgttgccatcgatcccacttgagtttaatggctagatcgtgggccatgttgacgagacgctcttctcctgagagtttcatgaccagcatgaaaggaactagttgtttgccaaaggatcccatccaggtgtaagtttccacatcgtaggtcaggaagagtctttctgtgcgaggatgagagccgatcgggaagaactggatttcctgccaccagttggaggattggctgttgatgtgatggaagtagaagtttctgcggcgcgccgagcattcgtgtttgtgcttgtacagacggccgcagtagtcgcagcgttgcacgggttgtatctcgtgaatgagctgtacctggcttcccttgacgagaaatttcagtgggaagccgaggcctggcgattgtatctcgtgctcttctatattcgctgtatcggcctgttcatcttctgtttcgatggtggtcatgctgacgagcccccgcgggaggcaagtccagacctcggcgcgggaggggcggagctgaaggacgagagcgcgcaggctggagctgtccagagtcctgagacgctgcggactcaggttagtaggtagggacagaagattaacttgcatgatcttttccagggcgtgcgggaggttcagatggtacttgatttccacaggttcgtttgtagagacgtcaatggcttgcagggttccgtgtcctttgggcgccactaccgtacctttgttttttcttttgatcggtggtggctctcttgcttcttgcatgctcagaagcggtgacggggacgcgcgccgggcggcagcggttgttccggacccgggggcatggctggtagtggcacgtcggcgccgcgcacgggcaggttctggtattgcgctctgagaagacttgcgtgcgccaccacgcgtcgattgacgtcttgtatctgacgtctctgggtgaaagctaccggccccgtgagcttgaacctgaaagagagttcaacagaatcaatttcggtatcgttaacggcagcttgtctcagtatttcttgtacgtcaccagagttgtcctggtaggcgatctccgccatgaactgctcgatttcttcctcctgaagatctccgcgacccgctctttcgacggtggccgcgaggtcattggagatacggcccatgagttgggagaatgcattcatgcccgcctcgttccagacgcggctgtaaaccacggccccctcggagtctcttgcgcgcatcaccacctgagcgaggttaagctccacgtgtctggtgaagaccgcatagttgcataggcgctgaaaaaggtagttgagtgtggtggcaatgtgttcggcgacgaagaaatacatgatccatcgtctcagcggcatttcgctaacatcgcccagagcttccaagcgctccatggcctcgtagaagtccacggcaaaattaaaaaactgggagtttcgcgcggacacggtcaattcctcctcgagaagacggatgagttcggctatggtggcccgtacttcgcgttcgaaggctcccgggatctcttcttcctcttctatctcttcttccactaacatctcttcttcgtcttcaggcgggggcggagggggcacgcggcgacgtcgacggcgcacgggcaaacggtcgatgaatcgttcaatgacctctccgcggcggcggcgcatggtttcagtgacggcgcggccgttctcgcgcggtcgcagagtaaaaacaccgccgcgcatctccttaaagtggtgactgggaggttctccgtttgggagggagagggcgctgattatacattttattaattggcccgtagggactgcgcgcagagatctgatcgtgtcaagatccacgggatctgaaaacctttcgacgaaagcgtctaaccagtcacagtcacaaggtaggctgagtacggcttcttgtgggcgggggtggttatgtgttcggtctgggtcttctgtttcttcttcatctcgggaaggtgagacgatgctgctggtgatgaaattaaagtaggcagttctaagacggcggatggtggcgaggagcaccaggtctttgggtccggcttgctggatacgcaggcgattggccattccccaagcattatcctgacatctagcaagatctttgtagtagtcttgcatgagccgttctacgggcacttcttcctcacccgttctgccatgcatacgtgtgagtccaaatccgcgcattggttgtaccagtgccaagtcagctacgactctttcggcgaggatggcttgctgtacttgggtaagggtggcttgaaagtcatcaaaatccacaaagcggtggtaagcccctgtattaatggtgtaagcacagttggccatgactgaccagttaactgtctggtgaccagggcgcacgagctcggtgtatttaaggcgcgaataggcgcgggtgtcaaagatgtaatcgttgcaggtgcgcaccagatactggtaccctataagaaaatgcggcggtggttggcggtagagaggccatcgttctgtagctggagcgccaggggcgaggtcttccaacataaggcggtgatagccgtagatgtacctggacatccaggtgattcctgcggcggtagtagaagcccgaggaaactcgcgtacgcggttccaaatgttgcgtagcggcatgaagtagttcattgtaggcacggtttgaccagtgaggcgcgcgcagtcattgatgctctatagacacggagaaaatgaaagcgttcagcgactcgactccgtagcctggaggaacgtgaacgggttgggtcgcggtgtaccccggttcgagacttgtactcgagccggccggagccgcggctaacgtggtattggcactcccgtctcgacccagcctacaaaaatccaggatacggaatcgagtcgttttgctggtttccgaatggcagggaagtgagtcctattttttttttttttgccgctcagatgcatcccgtgctgcgacagatgcgcccccaacaacagcccccctcgcagcagcagcagcagcaaccacaaaaggctgtccctgcaactactgcaactgccgccgtgagcggtgcgggacagcccgcctatgatctggacttggaagagggcgaaggactggcacgtctaggtgcgccttcgcccgagcggcatccgcgagttcaactgaaaaaagattctcgcgaggcgtatgtgccccaacagaacctatttagagacagaagcggcgaggagccggaggagatgcgagcttcccgctttaacgcgggtcgtgagctgcgtcacggtttggaccgaagacgagtgttgcgagacgaggatttcgaagttgatgaagtgacagggatcagtcctgccagggcacacgtggctgcagccaaccttgtatcggcttacgagcagacagtaaaggaagagcgtaacttccaaaagtcttttaataatcatgtgcgaaccctgattgcccgcgaagaagttacccttggtttgatgcatttgtgggatttgatggaagctatcattcagaaccctactagcaaacctctgaccgcccagctgtttctggtggtgcaacacagcagagacaatgaggctttcagagaggcgctgctgaacatcaccgaacccgaggggagatggttgtatgatcttatcaacattctacagagtatcatagtgcaggagcggagcctgggcctggccgagaaggtagctgccatcaattactcggttttgagcttgggaaaatattacgctcgcaaaatctacaagactccatacgttcccatagacaaggaggtgaagatagatgggttctacatgcgcatgacgctcaaggtcttgaccctgagcgatgatcttggggtgtatcgcaatgacagaatgcatcgcgcggttagcgccagcaggaggcgcgagttaagcgacagggaactgatgcacagtttgcaaagagctctgactggagctggaaccgagggtgagaattacttcgacatgggagctgacttgcagtggcagcctagtcgcagggctctgagcgccgcgacggcaggatgtgagcttccttacatagaagaggcggatgaaggcgaggaggaagagggcgagtacttggaagactgatggcacaacccgtgttttttgctagatggaacagcaagcaccggatcccgcaatgcgggcggcgctgcagagccagccgtccggcattaactcctcggacgattggacccaggccatgcaacgtatcatggcgttgacgactcgcaaccccgaagcctttagacagcaaccccaggccaaccgtctatcggccatcatggaagctgtagtgccttcccgatctaatcccactcatgagaaggtcctggccatcgtgaacgcgttggtggagaacaaagctattcgtccagatgaggccggactggtatacaacgctctcttagaacgcgtggctcgctacaacagtagcaatgtgcaaaccaatttggaccgtatgataacagatgtacgcgaagccgtgtctcagcgcgaaaggttccagcgtgatgccaacctgggttcgctggtggcgttaaatgctttcttgagtactcagcctgctaatgtgccgcgtggtcaacaggattatactaactttttaagtgctttgagactgatggtatcagaagtacctcagagcgaagtgtatcagtccggtcctgattacttctttcagactagcagacagggcttgcagacggtaaatctgagccaagcttttaaaaaccttaaaggtttgtggggagtgcatgccccggtaggagaaagagcaaccgtgtctagcttgttaactccgaactcccgcctgttattactgttggtagctcctttcaccgacagcggtagcatcgaccgtaattcctatttgggttacctactaaacctgtatcgcgaagccatagggcaaagtcaggtggacgagcagacctatcaagaaattacccaagtcagtcgcgctttgggacaggaagacactggcagtttggaagccactctgaacttcttgcttaccaatcggtctcaaaagatccctcctcaatatgctcttactgcggaggaggagaggatccttagatatgtgcagcagagcgtgggattgtttctgatgcaagagggggcaactccgactgcagcactggacatgacagcgcgaaatatggagcccagcatgtatgccagtaaccgacctttcattaacaaactgctggactacttgcacagagctgccgctatgaactctgattatttcaccaatgccatcttaaacccgcactggctgcccccacctggtttctacacgggcgaatatgacatgcccgaccctaatgacggatttctgtgggacgacgtggacagcgatgttttttcacctctttctgatcatcgcacgtggaaaaaggaaggcggtgatagaatgcattcttctgcatcgctgtccggggtcatgggtgctaccgcggctgagcccgagtctgcaagtccttttcctagtctacccttttctctacacagtgtacgtagcagcgaagtgggtagaataagtcgcccgagtttaatgggcgaagaggagtacctaaacgattccttgctcagaccggcaagagaaaaaaatttcccaaacaatggaatagaaagtttggtggataaaatgagtagatggaagacttatgctcaggatcacagagacgagcctgggatcatggggactacaagtagagcgagccgtagacgccagcgccatgacagacagaggggtcttgtgtgggacgatgaggattcggccgatgatagcagcgtgttggacttgggtgggagaggaaggggcaacccgtttgctcatttgcgccctcgcttgggtggtatgttgtgaaaaaaaataaaaaagaaaaactcaccaaggccatggcgacgagcgtacgttcgttcttctttattatctgtgtctagtataatgaggcgagtcgtgctaggcggagcggtggtgtatccggagggtcctcctccttcgtacgagagcgtgatgcagcagcagcaggcgacggcggtgatgcaatccccactggaggctccctttgtgcctccgcgatacctggcacctacggagggcagaaacagcattcgttactcggaactggcacctcagtacgataccaccaggttgtatctggtggacaacaagtcggcggacattgcttctctgaactatcagaatgaccacagcaacttcttgaccacggtggtgcagaacaatgactttacccctacggaagccagcacccagaccattaactttgatgaacgatcgcggtggggcggtcagctaaagaccatcatgcatactaacatgccaaacgtgaacgagtatatgtttagtaacaagttcaaagcgcgtgtgatggtgtccagaaaacctcccgacggtgctgcagttggggatacttatgatcacaagcaggatattttggaatatgagtggttcgagtttactttgccagaaggcaacttttcagttactatgactattgatttgatgaacaatgccatcatagataattacttgaaagtgggtagacagaatggagtgcttgaaagtgacattggtgttaagttcgacaccaggaacttcaagctgggatgggatcccgaaaccaagttgatcatgcctggagtgtatacgtatgaagccttccatcctgacattgtcttactgcctggctgcggagtggattttaccgagagtcgtttgagcaaccttcttggtatcagaaaaaaacagccatttcaagagggttttaagattttgtatgaagatttagaaggtggtaatattccggccctcttggatgtagatgcctatgagaacagtaagaaagaacaaaaagccaaaatagaagctgctacagctgctgcagaagctaaggcaaacatagttgccagcgactctacaagggttgctaacgctggagaggtcagaggagacaattttgcgccaacacctgttccgactgcagaatcattattggccgatgtgtctgaaggaacggacgtgaaactcactattcaacctgtagaaaaagatagtaagaatagaagctataatgtgttggaagacaaaatcaacacagcctatcgcagttggtatctttcgtacaattatggcgatcccgaaaaaggagtgcgttcctggacattgctcaccacctcagatgtcacctgcggagcagagcaggtttactggtcgcttccagacatgatgaaggatcctgtcactttccgctccactagacaagtcagtaactaccctgtggtgggtgcagagcttatgcccgtcttctcaaagagcttctacaacgaacaagctgtgtactcccagcagctccgccagtccacctcgcttacgcacgtcttcaaccgctttcctgagaaccagattttaatccgtccgccggcgcccaccattaccaccgtcagtgaaaacgttcctgctctcacagatcacgggaccctgccgttgcgcagcagtatccggggagtccaacgtgtgaccgttactgacgccagacgccgcacctgtccctacgtgtacaaggcactgggcatagtcgcaccgcgcgtcctttcaagccgcactttctaaaaaaaaaatgtccattcttatctcgcccagtaataacaccggttggggtctgcgcgctccaagcaagatgtacggaggcgcacgcaaacgttctacccaacatcccgtgcgtgttcgcggacattttcgcgctccatggggtgccctcaagggccgcactcgcgttcgaaccaccgtcgatgatgtaatcgatcaggtggttgccgacgcccgtaattatactcctactgcgcctacatctactgtggatgcagttattgacagtgtagtggctgacgctcgcaactatgctcgacgtaagagccggcgaaggcgcattgccagacgccaccgagctaccactgccatgcgagccgcaagagctctgctacgaagagctagacgcgtggggcgaagagccatgcttagggcggccagacgtgcagcttcgggcgccagcgccggcaggtcccgcaggcaagcagccgctgtcgcagcggcgactattgccgacatggcccaatcgcgaagaggcaatgtatactgggtgcgtgacgctgccaccggtcaacgtgtacccgtgcgcacccgtccccctcgcacttagaagatactgagcagtctccgatgttgtgtcccagcggcgaggatgtccaagcgcaaatacaaggaagaaatgctgcaggttatcgcacctgaagtctacggccaaccgttgaaggatgaaaaaaaaccccgcaaaatcaagcgggttaaaaaggacaaaaaagaagaggaagatggcgatgatgggctggcggagtttgtgcgcgagtttgccccacggcgacgcgtgcaatggcgtgggcgcaaagttcgacatgtgttgagacctggaacttcggtggtctttacacccggcgagcgttcaagcgctacttttaagcgttcctatgatgaggtgtacggggatgatgatattcttgagcaggcggctgaccgattaggcgagtttgcttatggcaagcgtagtagaataacttccaaggatgagacagtgtcaatacccttggatcatggaaatcccacccctagtcttaaaccggtcactttgcagcaagtgttacccgtaactccgcgaacaggtgttaaacgcgaaggtgaagatttgtatcccactatgcaactgatggtacccaaacgccagaagttggaggacgttttggagaaagtaaaagtggatccagatattcaacctgaggttaaagtgagacccattaagcaggtagcgcctggtctgggggtacaaactgtagacattaagattcccactgaaagtatggaagtgcaaactgaacccgcaaagcctactgccacctccactgaagtgcaaacggatccatggatgcccatgcctattacaactgacgccgccggtcccactcgaagatcccgacgaaagtacggtccagcaagtctgttgatgcccaattatgttgtacacccatctattattcctactcctggttaccgaggcactcgctactatcgcagccgaaacagtacctcccgccgtcgccgcaagacacctgcaaatcgcagtcgtcgccgtagacgcacaagcaaaccgactcccggcgccctggtgcggcaagtgtaccgcaatggtagtgcggaacctttgacactgccgcgtgcgcgttaccatccgagtatcatcacttaatcaatgttgccgctgcctccttgcagatatggccctcacttgtcgccttcgcgttcccatcactggttaccgaggaagaaactcgcgccgtagaagagggatgttgggacgcggaatgcgacgctacaggcgacggcgtgctatccgcaagcaattgcggggtggttttttaccagccttaattccaattatcgctgctgcaattggcgcgataccaggcatagcttccgtggcggttcaggcctcgcaacgacattgacattggaaaaaaaacgtataaataaaaaaaaatacaatggactctgacactcctggtcctgtgactatgttttcttagagatggaagacatcaatttttcatccttggctccgcgacacggcacgaagccgtacatgggcacctggagcgacatcggcacgagccaactgaacgggggcgccttcaattggagcagtatctggagcgggcttaaaaattttggctcaaccataaaaacatacgggaacaaagcttggaacagcagtacaggacaggcgcttagaaataaacttaaagaccagaacttccaacaaaaagtagtcgatgggatagcttccggcatcaatggagtggtagatttggctaaccaggctgtgcagaaaaagataaacagtcgtttggacccgccgccagcaaccccaggtgaaatgcaagtggaggaagaaattcctccgccagaaaaacgaggcgacaagcgtccgcgtcccgatttggaagagacgctggtgacgcgcgtagatgaaccgccttcttatgaggaagcaacgaagcttggaatgcccaccactagaccgatagccccaatggccaccggggtgatgaaaccttctcagttgcatcgacccgtcaccttggatttgccccctccccctgctgctactgctgtacccgcttctaagcctgtcgctgccccgaaaccagtcgccgtagccaggtcacgtcccgggggcgctcctcgtccaaatgcgcactggcaaaatactctgaacagcatcgtgggtctaggcgtgcaaagtgtaaaacgccgtcgctgcttttaattaaatatggagtagcgcttaacttgcctatctgtgtatatgtgtcattacacgccgtcacagcagcagaggaaaaaaggaagaggtcgtgcgtcgacgctgagttactttcaagatggccaccccatcgatgctgccccaatgggcatacatgcacatcgccggacaggatgcttcggagtacctgagtccgggtctggtgcagttcgcccgcgccacagacacctacttcaatctgggaaataagtttagaaatcccaccgtagcgccgacccacgatgtgaccaccgaccgtagccagcggctcatgttgcgcttcgtgcccgttgaccgggaggacaatacatactcttacaaagtgcggtacaccctggccgtgggcgacaacagagtgctggatatggccagcacgttctttgacattaggggcgtgttggacagaggtcccagtttcaaaccctattctggtacggcttacaactctctggctcctaaaggcgctccaaatgcatctcaatggattgcaaaaggcgtaccaactgcagcagccgcaggcaatggtgaagaagaacatgaaacagaggagaaaactgctacttacacttttgccaatgctcctgtaaaagccgaggctcaaattacaaaagagggcttaccaataggtttggagatttcagctgaaaacgaatctaaacccatctatgcagataaactttatcagccagaacctcaagtgggagatgaaacttggactgacctagacggaaaaaccgaagagtatggaggcagggctctaaagcctactactaacatgaaaccctgttacgggtcctatgcgaagcctactaatttaaaaggtggtcaggcaaaaccgaaaaactcggaaccgtcgagtgaaaaaattgaatatgatattgacatggaattttttgataactcatcgcaaagaacaaacttcagtcctaaaattgtcatgtatgcagaaaatgtaggtttggaaacgccagacactcatgtagtgtacaaacctggaacagaagacacaagttccgaagctaatttgggacaacagtctatgcccaacagacccaactacattggcttcagagataactttattggactcatgtactataacagtactggtaacatgggggtgctggctggtcaagcgtctcagttaaatgcagtggttgacttgcaggacagaaacacagaactttcttaccaactcttgcttgactctctgggcgacagaaccagatactttagcatgtggaatcaggctgtggacagttatgatcctgatgtacgtgttattgaaaatcatggtgtggaagatgaacttcccaactattgttttccactggacggcataggtgttccaacaaccagttacaaatcaatagttccaaatggagaagataataataattggaaagaacctgaagtaaatggaacaagtgagatcggacagggtaatttgtttgccatggaaattaaccttcaagccaatctatggcgaagtttcctttattccaatgtggctctgtatctcccagactcgtacaaatacaccccgtccaatgtcactcttccagaaaacaaaaacacctacgactacatgaacgggcgggtggtgccgccatctctagtagacacctatgtgaacattggtgccaggtggtctctggatgccatggacaatgtcaacccattcaaccaccaccgtaacgctggcttgcgttaccgatctatgcttctgggtaacggacgttatgtgcctttccacatacaagtgcctcaaaaattcttcgctgttaaaaacctgctgcttctcccaggctcctacacttatgagtggaactttaggaaggatgtgaacatggttctacagagttccctcggtaacgacctgcgggtagatggcgccagcatcagtttcacgagcatcaacctctatgctacttttttccccatggctcacaacaccgcttccacccttgaagccatgctgcggaatgacaccaatgatcagtcattcaacgactacctatctgcagctaacatgctctaccccattcctgccaatgcaaccaatattcccatttccattccttctcgcaactgggcggctttcagaggctggtcatttaccagactgaaaaccaaagaaactccctctttggggtctggatttgacccctactttgtctattctggttctattccctacctggatggtaccttctacctgaaccacacttttaagaaggtttccatcatgtttgactcttcagtgagctggcctggaaatgacaggttactatctcctaacgaatttgaaataaagcgcactgtggatggcgaaggctacaacgtagcccaatgcaacatgaccaaagactggttcttggtacagatgctcgccaactacaacatcggctatcagggcttctacattccagaaggatacaaagatcgcatgtattcatttttcagaaacttccagcccatgagcaggcaggtggttgatgaggtcaattacaaagacttcaaggccgtcgccataccctaccaacacaacaactctggctttgtgggttacatggctccgaccatgcgccaaggtcaaccctatcccgctaactatccctatccactcattggaacaactgccgtaaatagtgttacgcagaaaaagttcttgtgtgacagaaccatgtggcgcataccgttctcgagcaacttcatgtctatgggggcccttacagacttgggacagaatatgctctatgccaactcagctcatgctctggacatgacctttgaggtggatcccatggatgagcccaccctgctttatcttctcttcgaagttttcgacgtggtcagagtgcatcagccacaccgcggcatcatcgaggcagtctacctgcgtacaccgttctcggccggtaacgctaccacgtaagaagcttcttgcttcttgcaaatagcagctgcaaccatggcctgcggatcccaaaacggctccagcgagcaagagctcagagccattgtccaagacctgggttgcggaccctattttttgggaacctacgataagcgcttcccggggttcatggcccccgataagctcgcctgtgccattgtaaatacggccggacgtgagacggggggagagcactggttggctttcggttggaacccacgttctaacacctgctacctttttgatccttttggattctcggatgatcgtctcaaacagatttaccagtttgaatatgagggtctcctgcgccgcagcgctcttgctaccaaggaccgctgtattacgctggaaaaatctacccagaccgtgcagggcccccgttctgccgcctgcggacttttctgctgcatgttccttcacgcctttgtgcactggcctgaccgtcccatggacggaaaccccaccatgaaattgctaactggagtgccaaacaacatgcttcattctcctaaagtccagcccaccctgtgtgacaatcaaaaagcactctaccattttcttaatacccattcgccttattttcgctctcatcgtacacacatcgaaagggccactgcgttcgaccgtatggatgttcaataatgactcatgtaaacaacgtgttcaataaacatcactttatttttttacatgtatcaaggctctggattacttatttatttacaagtcgaatgggttctgacgagaatcagaatgacccgcaggcagtgatacgttgcggaactgatacttgggttgccacttgaattcgggaatcaccaacttgggaaccggtatatcgggcaggatgtcactccacagctttctggtcagctgcaaagctccaagcaggtcaggagccgaaatcttgaaatcacaattaggaccagtgctctgagcgcgagagttgcggtacaccggattgcagcactgaaacaccatcagcgacggatgtctcacgcttgccagcacggtgggatctgcaatcatgcccacatccagatcttcagcattggcaatgctgaacggggtcatcttgcaggtctgcctacccatggcgggcacccaattaggcttgtggttgcaatcgcagtgcagggggatcagtatcatcttggcctgatcctgtctgattcctggatacacggctctcatgaaagcatcatattgcttgaaagcctgctgggctttactaccctcggtataaaacatcccgcaggacctgctcgaaaactggttagctgcacagccggcatcattcacacagcagcgggcgtcattgttggctatttgcaccacacttctgccccagcggttttgggtgattttggttcgctcgggattctcctttaaggctcgttgtccgttctcgctggccacatccatctcgataatctgctccttctgaatcataatattgccatgcaggcacttcagcttgccctcataatcattgcagccatgaggccacaacgcacagcctgtacattcccaattatggtgggcgatctgagaaaaagaatgtatcattccctgcagaaatcttcccatcatcgtgctcagtgtcttgtgactagtgaaagttaactggatgcctcggtgctcttcgtttacgtactggtgacagatgcgcttgtattgttcgtgttgctcaggcattagtttaaaacaggttctaagttcgttatccagcctgtacttctccatcagcagacacatcacttccatgcctttctcccaagcagacaccaggggcaagctaatcggattcttaacagtgcaggcagcagctcctttagccagagggtcatctttagcgatcttctcaatgcttcttttgccatccttctcaacgatgcgcacgggcgggtagctgaaacccactgctacaagttgcgcctcttctctttcttcttcgctgtcttgactgatgtcttgcatggggatatgtttggtcttccttggcttctttttggggggtatcggaggaggaggactgtcgctccgttccggagacagggaggattgtgacgtttcgctcaccattaccaactgactgtcggtagaagaacctgaccccacacggcgacaggtgtttttcttcgggggcagaggtggaggcgattgcgaagggctgcggtccgacctggaaggcggatgactggcagaaccccttccgcgttcgggggtgtgctccctgtggcggtcgcttaactgatttccttcgcggctggccattgtgttctcctaggcagagaaacaacagacatggaaactcagccattgctgtcaacatcgccacgagtgccatcacatctcgtcctcagcgacgaggaaaaggagcagagcttaagcattccaccgcccagtcctgccaccacctctaccctagaagataaggaggtcgacgcatctcatgacatgcagaataaaaaagcgaaagagtctgagacagacatcgagcaagacccgggctatgtgacaccggtggaacacgaggaagagttgaaacgctttctagagagagaggatgaaaactgcccaaaacagcgagcagataactatcaccaagatgctggaaatagggatcagaacaccgactacctcatagggcttgacggggaagacgcgctccttaaacatctagcaagacagtcgctcatagtcaaggatgcattattggacagaactgaagtgcccatcagtgtggaagagctcagctgcgcctacgagcttaaccttttttcacctcgtactccccccaaacgtcagccaaacggcacctgcgagccaaatcctcgcttaaacttttatccagcttttgctgtgccagaagtactggctacctatcacatcttttttaaaaatcaaaaaattccagtctcctgccgcgctaatcgcacccgcgccgatgccctactcaatctgggacctggttcacgcttacctgatatagcttccttggaagaggttccaaagatcttcgagggtctgggcaataatgagactcgggccgcaaatgctctgcaaaagggagaaaatggcatggatgagcatcacagcgttctggtggaattggaaggcgataatgccagactcgcagtactcaagcgaagcgtcgaggtcacacacttcgcatatcccgctgtcaacctgccccctaaagtcatgacggcggtcatggaccagttactcattaagcgcgcaagtcccctttcagaagacatgcatgacccagatgcctgtgatgagggtaaaccagtggtcagtgatgagcagctaacccgatggctgggcaccgactctccccgggatttggaagagcgtcgcaagcttatgatggccgtggtgctggttaccgtagaactagagtgtctccgacgtttctttaccgattcagaaaccttgcgcaaactcgaagagaatctgcactacacttttagacacggctttgtgcggcaggcatgcaagatatctaacgtggaactcaccaacctggtttcctacatgggtattctgcatgagaatcgcctaggacaaagcgtgctgcacagcacccttaagggggaagcccgccgtgattacatccgcgattgtgtctatctctacctgtgccacacgtggcaaaccggcatgggtgtatggcagcaatgtttagaagaacagaacttgaaagagcttgacaagctcttacagaaatctcttaaggttctgtggacagggttcgacgagcgcaccgtcgcttccgacctggcagacctcatcttcccagagcgtctcagggttactttgcgaaacggattgcctgactttatgagccagagcatgcttaacaattttcgctctttcatcctggaacgctccggtatcctgcccgccacctgctgcgcactgccctccgactttgtgcctctcacctaccgcgagtgccccccgccgctatggagtcactgctacctgttccgtctggccaactatctctcctaccactcggatgtgatcgaggatgtgagcggagacggcttgctggagtgccactgccgctgcaatctgtgcacgccccaccggtccctagcttgcaacccccagttgatgagcgaaacccagataataggcacctttgaattgcaaggccccagcagccaaggcgatgggtcttctcctgggcaaagtttaaaactgaccccgggactgtggacctccgcctacttgcgcaagtttgctccggaagattaccacccctatgaaatcaagttctatgaggaccaatcacagcctccaaaggccgaactttcggcttgcgtcatcacccagggggcaattctggcccaattgcaagccatccaaaaatcccgccaagaatttctactgaaaaagggtaagggggtctaccttgacccccagaccggcgaggaactcaacacaaggttccctcaggatgtcccaacgacgagaaaacaagaagttgaaggtgcagccgccgcccccagaagatatggaggaagattgggacagtcaggcagaggaggcggaggaggacagtctggaggacagtctggaggaagacagtttggaggaggaaaacgaggaggcagaggaggtggaagaagtaaccgccgacaaacagttatcctcggctgcggagacaagcaacagcgctaccatctccgctccgagtcgaggaacccggcggcgtcccagcagtagatgggacgagaccggacgcttcccgaacccaaccagcgcttccaagaccggtaagaaggatcggcagggatacaagtcctggcgggggcataagaatgccatcatctcctgcttgcatgagtgcgggggcaacatatccttcacgcggcgctacttgctattccaccatggggtgaactttccgcgcaatgttttgcattactaccgtcacctccacagcccctactatagccagcaaatcccgacagtctcgacagataaagacagcggcggcgacctccaacagaaaaccagcagcggcagttagaaaatacacaacaagtgcagcaacaggaggattaaagattacagccaacgagccagcgcaaacccgagagttaagaaatcggatctttccaaccctgtatgccatcttccagcagagtcggggtcaagagcaggaactgaaaataaaaaaccgatctctgcgttcgctcaccagaagttgtttgtatcacaagagcgaagatcaacttcagcgcactctcgaggacgccgaggctctcttcaacaagtactgcgcgctgactcttaaagagtaggcagcgaccgcgcttattcaaaaaaggcgggaattacatcatcctcgacatgagtaaagaaattcccacgccttacatgtggagttatcaaccccaaatgggattggcagcaggcgcctcccaggactactccacccgcatgaattggctcagcgccgggccttctatgatttctcgagttaatgatatacgcgcctaccgaaaccaaatacttttggaacagtcagctcttaccaccacgccccgccaacaccttaatcccagaaattggcccgccgccctagtgtaccaggaaagtcccgctcccaccactgtattacttcctcgagacgcccaggccgaagtccaaatgactaatgcaggtgcgcagttagctggcggctccaccctatgtcgtcacaggcctcggcataatataaaacgcctgatgatcagaggccgaggtatccagctcaacgacgagtcggtgagctctccgcttggtctacgaccagacggaatctttcagattgccggctgcgggagatcttccttcacccctcgtcaggctgttctgactttggaaagttcgtcttcgcaaccccgctcgggcggaatcgggaccgttcaatttgtagaggagtttactccctctgtctacttcaaccccttctccggatctcctgggcactacccggacgagttcataccgaacttcgacgcgattagcgagtcagtggacggctacgattgatgtctggtgacgcggctgagctatctcggctgcgacatctagaccactgccgccgctttcgctgctttgcccgggaacttattgagttcatctacttcgaactccccaaggatcaccctcaaggtccggcccacggagtgcggattactatcgaaggcaaaatagactctcgcctgcaacgaattttctcccagcggcccgtgctgatcgagcgagaccagggaaacaccacggttagtaatcaattacggggtcattagttcatagcccatatatggagttaacttgtttattgcagcttataatggttacaaataaagcaatagcatcacaaatttcacaaataaagcatttttttcactgcattctagttgtggtttgtccaaactcatcaatgtatcttatcatgtctgctcgaagcggccggccgccccgactctagagtcgcggcctcattaggaagttcctatactttctagagaataggaacttctcagaagaactcgtcaagaaggcgatagaaggcgatgcgctgcgaatcgggagcggcgataccgtaaagcacgaggaagcggtcagcccattcgccgccaagctcttcagcaatatcacgggtagccaacgctatgtcctgatagcggtccgccacacccagccggccacagtcgatgaatccagaaaagcggccattttccaccatgatattcggcaagcaggcatcgccatgggtcacgacgagatcctcgccgtcgggcatgcgcgccttgagcctggcgaacagttcggctggcgcgagcccctgatgctcttcgtccagatcatcctgatcgacaagaccggcttccatccgagtacgtgctcgctcgatgcgatgtttcgcttggtggtcgaatgggcaggtagccggatcaagcgtatgcagccgccgcattgcatcagccatgatggatactttctcggcaggagcaaggtgagatgacaggagatcctgccccggcacttcgcccaatagcagccagtcccttcccgcttcagtgacaacgtcgagcacagctgcgcaaggaacgcccgtcgtggccagccacgatagccgcgctgcctcgtcctgcagttcattcagggcaccggacaggtcggtcttgacaaaaagaaccgggcgcccctgcgctgacagccggaacacggcggcatcagagcagccgattgcctgttgtgcccagtcatagccgaatagcctctccacccaagcggccggagaacctgcgtgcaatccatcttgttcaatggccgatcccataacaccccttgtattactgtttatgtaagcagacagttttactgttcgtgatgatatatttttatcttgtgcaatgtaacaggttgtggccatagcgggcccgggattttcctccacgtccccgcatgttagaagacttcccctgccctcggctctggaagttcctatactttctagagaataggaacttcccgccagaatgcgttcgcacagccgccagccggtcactccgttgatggttactcggaacagcagggagccgtcggggttgatcaggcgctcgtcgataattttgttgccgttccacagggtccctgttacagtgatctttttgccgtcgaacacggcgatgccttcatacggccgtccgaaatagtcgatcatgttcggcgtaaccccgtcgattaccagtgtgccatagtgcaggatcaccttaaagtgatgatcatccacagggtacaccaccttaaaaattttttcgatctggcccatttggtcgccgctcagaccttcatacgggatgatgacatggatgtcgatcttcagcccattttcaccgctcaggacaatcctttggatcggagttacggacaccccgagattctgaaacaaactggacacacctccctgttcaaggacttggtccaggttgtagccggctgtctgtcgccagtccccaacgaaatcttcgagtgtgaagaccatggatccgggcccggggttttcttcaacgtctccagcctgcttcagcaggctgaagttagtagctccgcttcctcgagctcgagatctggcgaaggcgatgggggtcttgaaggcgtgctggtactccacgatgcccagctcggtgttgctgtgcagctcctccacgcggcggaaggcgaacatggggcccccgttctgcaggatgctggggtggatggcgctcttgaagtgcatgtggctgtccaccacgaagctgtagtagccgccgtcgcgcaggctgaaggtgcgggcgaagctgcccaccagcacgttatcgcccatggggtgcaggtgctccacggtggcgttgctgcggatgatcttgtcggtgaagatcacgctgtcctcggggaagccggtgcccaccaccttgaagtcgccgatcacgcggccggcctcgtagcggtagctgaagctcacgtgcagcacgccgccgtcctcgtacttctcgatgcgggtgttggtgtagccgccgttgttgatggcgtgcaggaaggggttctcgtagccgctggggtaggtgccgaagtggtagaagccgtagcccatcacgtggctcagcaggtaggggctgaaggtcagggcgcctttggtgctcttcatcttgttggtcatgcggccctgctcgggggtgccctctccgccgcccaccagctcgaactccacgccgttcagggtgccggtgatgcggcactcgatcttcatggcgggcatggtggcgaccggtagcgctagcggcttcggtaccacgcgttcgctcgaattaatcaattctttgccaaaatgatgagacagcacaataaccagcacgttgcccaggagctgtaggaaaaagaagaaggcatgaacatggttagcagaggctctagagccgccggtcacacgccagaagccgaaccccgccctgccccgtcccccccgaaggcagccgtccccccgcggacagccccgaggctggagagggagaaggggacggcggcgcggcgacgcacgaaggccctccccgcccatttccttcctgccggggccctcccggagcccctcaaggctttcacgcagccacagaaaagaaacaagccgtcattaaaccaagcgctaattacagcccggaggagaagggccgtcccgcccgctcacctgtgggagtaacgcggtcagtcagagccggggcgggcggcgcgaggcggcgcggagcggggcacggggcgaaggcaacgcagcgactcccgcccgccgcgcgcttcgctttttatagggccgccgccgccgccgcctcgccataaaaggaaactttcggagcgcgccgctctgattggctgccgccgcacctctccgcctcgccccgccccgcccctcgccccgccccgccccgcctggcgcgcgccccccccccccccccgcccccatcgctgcacaaaataattaaaaaataaataaatacaaaattgggggtggggaggggggggagatggggagagtgaagcagaacgtggggctcacctcgaccatggtaatagcgatgactaatacgtagatgtactgccaagtaggaaagtcccataaggtcatgtactgggcataatgccaggcgggccatttaccgtcattgacgtcaatagggggcgtacttggcatatgatacacttgatgtactgccaagtgggcagtttaccgtaaatactccacccattgacgtcaatggaaagtccctattggcgttactatgggaacatacgtcattattgacgtcaatgggcgggggtcgttgggcggtcagccaggcgggccatttaccgtaagttatgtaacgcggaacaacaacaattgcattcattttatgtttcaggttcagggggaggtgtggtcctgcgattccatcgagtgcacctacaccctgctgaagaccctatgcggcctaagagacctgctaccaatgaattaaaaaaaaatgattaataaaaaatcacttacttgaaatcagcaataaggtctctgttgaaattttctcccagcagcacctcacttccctcttcccaactctggtattctaaaccccgttcagcggcatactttctccatactttaaaggggatgtcaaattttagctcctctcctgtacccacaatcttcatgtctttcttcccagatgaccaagagagtccggctcagtgactccttcaaccctgtctacccctatgaagatgaaagcacctcccaacacccctttataaacccagggtttatttccccaaatggcttcacacaaagcccagacggagttcttactttaaaatgtttaaccccactaacaaccacaggcggatctctacagctaaaagtgggagggggacttacagtggatgacactgatggtaccttacaagaaaacatacgtgctacagcacccattactaaaaataatcactctgtagaactatccattggaaatggattagaaactcaaaacaataaactatgtgccaaattgggaaatgggttaaaatttaacaacggtgacatttgtataaaggatagtattaacaccttatggactggaataaaccctccacctaactgtcaaattgtggaaaacactaatacaaatgatggcaaacttactttagtattagtaaaaaatggagggcttgttaatggctacgtgtctctagttggtgtatcagacactgtgaaccaaatgttcacacaaaagacagcaaacatccaattaagattatattttgactcttctggaaatctattaactgaggaatcagacttaaaaattccacttaaaaataaatcttctacagcgaccagtgaaactgtagccagcagcaaagcctttatgccaagtactacagcttatcccttcaacaccactactagggatagtgaaaactacattcatggaatatgttactacatgactagttatgatagaagtctatttcccttgaacatttctataatgctaaacagccgtatgatttcttccaatgttgcctatgccatacaatttgaatggaatctaaatgcaagtgaatctccagaaagcaacatagctacgctgaccacatccccctttttcttttcttacattacagaagacgacaactaaaataaagtttaagtgtttttatttaaaatcacaaaattcgagtagttattttgcctccaccttcccatttgacagaatacacagtcctttctccccggctggccttaaaaagcatcatatcatgggtaacagacatattcttaggtgttatattccacacggtttcctgtcgagccaaacgctcatcagtgatattaataaactccccgggcagctcacttaagttcatgtcgctgtccagctgctgagccacaggctgctgtccaacttgcggttgcttaacgggcggcgaaggagaagtccacgcctacatgggggtagagtcataatcgtgcatcaggatagggcggtggtgctgcagcagcgcgcgaataaactgctgccgccgccgctccgtcctgcaggaatacaacatggcagtggtctcctcagcgatgattcgcaccgcccgcagcataaggcgccttgtcctccgggcacagcagcgcaccctgatctcacttaaatcagcacagtaactgcagcacagcaccacaatattgttcaaaatcccacagtgcaaggcgctgtatccaaagctcatggcggggaccacagaacccacgtggccatcataccacaagcgcaggtagattaagtggcgacccctcataaacacgctggacataaacattacctcttttggcatgttgtaattcaccacctcccggtaccatataaacctctgattaaacatggcgccatccaccaccatcctaaaccagctggccaaaacctgcccgccggctatacactgcagggaaccgggactggaacaatgacagtggagagcccaggactcgtaaccatggatcatcatgctcgtcatgatatcaatgttggcacaacacaggcacacgtgcatacacttcctcaggattacaagctcctcccgcgttagaaccatatcccagggaacaacccattcctgaatcagcgtaaatcccacactgcagggaagacctcgcacgtaactcacgttgtgcattgtcaaagtgttacattcgggcagcagcggatgatcctccagtatggtagcgcgggtttctgtctcaaaaggaggtagacgatccctactgtacggagtgcgccgagacaaccgagatcgtgttggtcgtagtgtcatgccaaatggaacgccggacgtagtcattctcgtattttgtatagcaaaacgcggccctggcagaacacactcttcttcgccttctatcctgccgcttagcgtgttccgtgtgatagttcaagtacagccacactcttaagttggtcaaaagaatgctggcttcagttgtaatcaaaactccatcgcatctaattgttctgaggaaatcatccacggtagcatatgcaaatcccaaccaagcaatgcaactggattgcgtttcaagcaggagaggagagggaagagacggaagaaccatgttaatttttattccaaacgatctcgcagtacttcaaattgtagatcgcgcagatggcatctctcgcccccactgtgttggtgaaaaagcacagctaaatcaaaagaaatgcgattttcaaggtgctcaacggtggcttccaacaaagcctccacgcgcacatccaagaacaaaagaataccaaaagaaggagcattttctaactcctcaatcatcatattacattcctgcaccattcccagataattttcagctttccagccttgaattattcgtgtcagttcttgtggtaaatccaatccacacattacaaacaggtcccggagggcgccctccaccaccattcttaaacacaccctcataatgacaaaatatcttgctcctgtgtcacctgtagcgaattgagaatggcaacatcaattgacatgcccttggctctaagttcttctttaagttctagttgtaaaaactctctcatattatcaccaaactgcttagccagaagccccccgggaacaagagcaggggacgctacagtgcagtacaagcgcagacctccccaattggctccagcaaaaacaagattggaataagcatattgggaaccaccagtaatatcatcgaagttgctggaaatataatcaggcagagtttcttgtagaaattgaataaaagaaaaatttgccaaaaaaacattcaaaacctctgggatgcaaatgcaataggttaccgcgctgcgctccaacattgttagttttgaattagtctgcaaaaataaaaaaaaaacaagcgtcatatcatagtagcctgacgaacaggtggataaatcagtctttccatcacaagacaagccacagggtctccagctcgaccctcgtaaaacctgtcatcgtgattaaacaacagcaccgaaagttcctcgcggtgaccagcatgaataagtcttgatgaagcatacaatccagacatgttagcatcagttaaggagaaaaaacagccaacatagcctttgggtataattatgcttaatcgtaagtatagcaaagccacccctcgcggatacaaagtaaaaggcacaggagaataaaaaatataattatttctctgctgctgtttaggcaacgtcgcccccggtccctctaaatacacatacaaagcctcatcagccatggcttaccagagaaagtacagcgggcacacaaaccacaagctctaaagtcactctccaacctctccacaatatatatacacaagccctaaactgacgtaatgggactaaagtgtaaaaaatcccgccaaacccaacacacaccccgaaactgcgtcaccagggaaaagtacagtttcacttccgcaatcccaacaagcgtcacttcctctttctcacggtacgtcacatcccattaacttacaacgtcattttcccacggccgcgccgccccttttaaccgttaaccccacagccaatcaccacacggcccacactttttaaaatcacctcatttacatattggcaccattccatctataaggtatattattgatgatggccaagctatttaggtgacactatagaatactcaagctatgcatcaagcttggtaccgagctcggatccactagtaacggccgccagtgtgctggaattcgcccttgtttaaacgcgatcgcttgagatcgttttggtctgcgcgtaatctcttgctctgaaaacgaaaaaaccgccttgcagggcggtttttcgaaggttctctgagctaccaactctttgaaccgaggtaactggcttggaggagcgcagtcaccaaaacttgtcctttcagtttagccttaaccggcgcatgacttcaagactaactcctctaaatcaattaccagtggctgctgccagtggtgcttttgcatgtctttccgggttggactcaagacgatagttaccggataaggcgcagcggtcggactgaacggggggttcgtgcatacagtccagcttggagcgaactgcctacccggaactgagtgtcaggcgtggaatgagacaaacgcggccataacagcggaatgacaccggtaaaccgaaaggcaggaacaggagagcgcacgagggagccgccagggggaaacgcctggtatctttatagtcctgtcgggtttcgccaccactgatttgagcgtcagatttcgtgatgcttgtcaggggggcggagcctatggaaaaacggctttgccgcggccctctcacttccctgttaagtatcttcctggcatcttccaggaaatctccgccccgttcgtaagccatttccgctcgccgcagtcgaacgaccgagcgtagcgagtcagtgagcgaggaagcggaatatatcctgtatcacatattctgctgacgcaccggtgcagccttttttctcctgccacatgaagcacttcactgacaccctcatcagtgccaacatagtaagccagtatacactccgctagcgcgatcgcttaattaatttaaatcctgcagggtttaaacggccggcctagggataacagggtaatcgtaactataacggtcctaaggtagcgaatgatgtccggcggtgcttttgccgttacgcaccaccccgtcagtagctgaacaggagggacagctgatagaaacagaagccactggagcacctcaaaaacaccatcatacactaaatcagtaagttggcagcatcacccgacgcactttgcgccgaataaatacctgtgacggaagatcacttcgcagaataaataaatcctggtgtccctgttgataccgggaagccctgggccaacttttggcgaaaatgagacgttgatcggcacgtaagaggttccaactttcaccataatgaaataagatcactaccgggcgtattttttgagttatcgagattttcaggagctaaggaagctaaaatggagaaaaaaatcactggatataccaccgttgatatatcccaatggcatcgtaaagaacattttgaggcatttcagtcagttgctcaatgtacctataaccagaccgttcagctggatattacggcctttttaaagaccgtaaagaaaaataagcacaagttttatccggcctttattcacattcttgcccgcctgatgaatgctcatccggaattccgtatggcaatgaaagacggtgagctggtgatatgggatagtgttcacccttgttacaccgttttccatgagcaaactgaaacgttttcatcgctctggagtgaataccacgacgatttccggcagtttctacacatatattcgcaagatgtggcgtgttacggtgaaaacctggcctatttccctaaagggtttattgagaatatgtttttcgtctcagccaatccctgggtgagtttcaccagttttgatttaaacgtggccaatatggacaacttcttcgcccccgttttcaccatgggcaaatattatacgcaaggcgacaaggtgctgatgccgctggcgattcaggttcatcatgccgtctgtgatggcttccatgtcggcagaatgcttaatgaattacaacagtactgcgatgagtggcagggcggggcgtaacctgcaggttaattaaggaagggcgaattctgcagatatccatcacactggcggccgctcgagcatgcatctagagggcccaattcgccctatagtgagtcgtattacaattcactggcc

SEQ ID NO: 59 - DNA, 32538 bp, Artificial Sequence
  pHCA-AAVS1-globin-mgmt
catcatcaataatataccttattttggattgaagccaatatgataatgagggggtggagtttgtgacgtggcgcggggcgtgggaacggggcgggtgacgtagtagtgtggcggaagtgtgatgttgcaagtgtggcggaacacatgtaagcgacggatgtggcaaaagtgacgtttttggtgtgcgccggtgtacacaggaagtgacaattttcgcgcggttttaggcggatgttgtagtaaatttgggcgtaaccgagtaagatttggccattttcgcgggaaaactgaataagaggaagtgaaatctgaataattttgtgttactcatagcgcgtaatatttgtctagggccgcggggactttgaccgtttacgtggagactcgcccaggtgtttttctcaggtgttttccgcgttccgggtcaaagttggcgttttgattcggccgaaggattacatgagcttagaaatgtaattagcatagtgtgtggcatagtgtagataccaaataaatatgatctctccttctactcttgaaaatgcaaacacattcttggtggtcctaaaatagcctgtaacatggtttactcagcagcatttgctattcaaggcagatctgcctttagtcattggctgcgctcctgaacagctgtgtgaaaggctaacttttgtaaaccaaatcaaaataaaatgcagcaaaaatttgtcactgaaaggaaatcctcagtatatccttttatgaaatgaaagatccctcatccaaacttaacttttttaaaagtgcgcatttggagatatagccctttcttatgaatcctaattcaattttggccataaacacacgttgatgttccccaccccaaagcacatagcaacaagagtaggttctatattgaaaataatgacaatttaaaaacatgtacttatttcactgtatgtggacagtgtctatgattgcatcatgaagtgtcatataaccatgtacgtgtacatgagagagagatagagagagaagtggtagggtggtggtggtagaggggatggcgatagtaatcatggtaatggtagaggtgatggaggtggtaatgacggaggtaagggtggtagtgatgatggtggtggtggtaatggtggtggatgtggtggtggcaattgggatggtgggatggtggtagccatggtgatggtggtaatggtgttgatttaaagggtggtggtagtgaaggtgagggtagtggtggtggaggtggtggtgctggtagcaatagtgatggtggtgatggtgttgatgagggtgttgggatcagggtgagttcccacagtatatttcattcttgttgtaccactctgtcaacagcaccactgactgggacagaggaagaaggcacactctgaatgtgttattaacagaaacctcaaaacagtctgtctccttgtagtcattcaaaattatctttttcttacctggaaaactgaaactgaattaccgggaaaaacacaggagatttttgtttgttaatatgctgccaataaagtaattttatgtcaaatttaactacaggaaagggcaaggcattttctaagttccttagatgtcatgtggctaaaaaaaacaaaaggatggacagcagttagatactgtacacttagctgtttgaagccatatattcagaaagcagatgttgggagttggtgtttgaggactgatttcctggaggtattttatataggccaagttcattgttctaaactctaagggcttgacttgagggaggaaaagaggcaagaacatgtttagttttgctgacagcatcacatgggcagccctaaggctagacaactttagggcctgaagcttattctaggaaagaagcacctacagagtggcactgggctcccctccactatagagatgaagtcatatgacagtaaagggcaggcagggctgcctagggggcccagaactgacacttccattagaatgagcacaggccagggagagaagtggggaaccagagagaaggagctggaattcctttctctccatacataaatgcctgcagagtcccatttcagaatccggcagacaaagccaccaatgtgatccccatgaccttataaacattcattaaaatgcatttcaaggcatgtgatggcctccccaccccctagataatgagaaaacaaaggtttctcttctgatagagacaagttcagctctgaagtcaacattatttctggttctgtctgaacaatgacatatggcaactcttccctttctatagttctagtccagaatgacaaaaaaggggaaaaatttcttagagaaggtagagattatacgaatacagtccatgaaatgagcataaggagaataaagaatataacttatccaaagaagtctggcaggctgttataaatgcttgattttggacactgtagttggaggtttaacatggacaccaataaaaaggtcagcaaagggtatgcactgttcctattgggcaagaagataggaggtcaaaggtaaccaggaaagataaactcagggagacttattttccctccagagggcactgggcttgtaggccctgggcaaaattgtcaaaaaggtgaaaatcgcctgtggtttatttagtctgctctttcttcactagtgcctcaccagttcagttcaggccaatttgctagcctctaactcctagaccgtcagaactgctgggcccttcaagacgggctgctcacacccactcatgttaagcctggtgaggcctgtactctgttttcacaggaagaaatcctcacccagtcttccccaaacacattcccaggttctgtcattagtgggatagagatgattactgtggggagaagagaaacatctggatggatttggtgaggttgatctatagaggaagtaggtgctgcctgaggtagctgtaatagaagctaaaggtcaaaggagagggccctgtcccaatccagatgactccacttctgctggacccaggttcacaagcttaatctacatttcacctaaatttggctaacaagcccaaaatcacacaggcaaagggagaagtggaggcagaaccgaggttggaggccaccagggccaccgggcagagatcatttaagcccaaccttctcacttctccctgggctctgcctctcttaaaggaccttgtggtgtgacctcttgtaggtccctttcacactcggggcctcagtttccccactgtaaagtgaatgggtcccagctttggtaagcttatgcttacctgatgctttcttcctgggctgctcttgtagagaaaagataaatcttcttcctccatccacgagggcttctttccctgggggtgagagtaggctgaggagagccacttgcacacactcttaaagaaagtattacctgcaccagctcagtgagaggcacagatcagactgttacttgaatcaaattatgagcctccccaaatatatctatgacatttaaataggggattacttgaacatagactttgggatccggtgtggagtgcaggagactagcaaagtgaatcctgagagtagcaggtctgcacctgttggatcgagaaaggcggcctacaattctggtcaaatgagctgtgcttattgacatattctattagagagtactaccaggtcaccagtcaccagaaaggctgccagctctccaaccacctccagggaactatcctgaatggggccttaacaagcctaagagagggttggtttgggtcccaagccaatatttgctctgctttatgtcagtcatatggaacccaaaccaaccctctcctatgtgcctcaccagtcggtgcagggatcccaatttcaagtttggttttttatggtcaaagtccagcatagattaaatgaaggggtgtgatgatggtgttaaaagagaactccagaccagtttaactcttggacacacatcccatctcaccatggtgcttccaaccttccagagatgatgggctcctattttctgatgacaaagccctccacaggattgctgcctggccatcagggagtgcctctgtaactgaggctgagatcccactttcagtcctccagctgtggcccatccctgctccgcccaccgggtatggcctgtcctaggctcttaggtatggctgcattgtgaaatgatggctacagagctggcatctcctgtagtctggttcatctagtgcactacctcatagttaaaagaaatctgtttaagccactgagggtggctcctagtgccaactccaagaacaggaagcttcccttttttgggaggaggggcagatggtaacatggatcgtccaggtcaatgggagcagggcaaccacagtaagtactggacaacaacacaaaactccatgtgtggcttccatcgagtccctctccaattggtttggtcttctccgtcccatgcagcactttagcaaggggcctggctgaaggctatgaattgtgtggagcctcctcattgcagtctccaaccatctgatgctgggaaaatgtcaccaggatgcagccatgccgtgtggccaatgaaccgagaaaacaccccttttctagaatgctctaaagaggcagaataatccagaggtgaggaaggaaatactccaccagagacccaggcagttcctacaaaagccagactttccttcacctagggagtgacaagaccagtggaaaacactctcaagcagtaacccccaaatgctctgcaagccagtggcgtccagataccgcacaagcgagtgggctgtctaatcccatcatcatgatgtaaatatctctaggctgccccgggctgtgcctgaccctgtcttcagctttccacacctccacctacagcccatgcacagaaggaccacccaggaatgctgcaagtgtggcacctccagggccacccagggagaaggagggcagctatgctggtggctccaggcccatttggcgggtggtaccttcacaccacaaagcccaaactgaggccccagatttggctgatgagggcatattggacaggggtcacttatgctcttccccattgccacctggcctctggctacctggacttggctacctgtggatcctctcacaggtgccaccatcttggctgagtctccagatgcgaggtccctgaggcagtggcaggcttctcgctaatgctgatgggattaggaatgggataggtggggagggccctggactgggccctgatgagccaagtgggtttttagaggggctactggtacatttcagggacaggacatctggtagagctaagctggggcaataaggagccactgctaatctgagagctagaaacaatcagcttctgggtcattattaattagggtagtttgggctgtgtggaagtcacgtactatatggggtagccacagctctctctacagataatctctaagacttctgattgggaccgtgtgaatgcagtagcaatatctcttcttactgccaggccctgccagtcctgcctccacgccctggctggccccccttatgatctgacccatgccaggctgccatagtatgttacttctgcattagcactccttgggacctgcctctccactgtccctcagactttaaagaactatacaaacccaaggggctcttcccaagagaattgatatgacttgaggtgattccatttctggaagtagtcactccattttctgcctcactctttcagtgcttcacagagcaggttcgattaagcacacagattaatggtaccggggccactagggacaggattgggcaccagggactccagagtccaggcccaacccctccccattcaacccaggaggccaggccccagcccttccgccctcagatgaaggagtccaggcccccagcctctccccattcagacccaggggtccaggcccagccccgcctccctaagacccagaagtccaggcccccagcccctcctccctcagacccacgagtccaggccccagcccctcctccctcggacccaggagtccaggcccccagtccctccaccctcagacccaggagtccaggccccagcccctcctccctcggacccaggagtccaggccccagcccctcctctctcaaacccaggagcccaggcccccagctcttctctgttcagccctaagaatcctggctccagcccctcctactctagcccccaaccccctagccactaaggcaattggggtgcaggaatgggggcagggtaccagcctcaccaagtggttgataaacccacgtggggtaccctaagaacttgggaacagccacagcaggggggcgatgcttggggacctgcctggagaaggatgcaggacgagaaacacagccccaggtggagaaactggccgggaatcaagagtcacccagagacagtgaccaaccatccctgttttcctaggactgagggtttcagtgctaaaactaggctgtcctgggcaaacagcataagctggtcaccccacacccagacctgacccaaacccagctcccctgcttcttggccacgtaacctgagaagggaatccctcctctctgaaccccagcccaccccaatgctccaggcctcctgggataccccgaagagtgagtttgccaagcagtcaccccacagttggaggagaatccacccaaaaggcagcctggtagacagggctggggtggcctctcgtggggtccaggccaagtaggtggcctggggcctctgggggatgcaggggaagggggatgcaggggaacggggatgcaggggaacggggctcagtctgaagagcagagccaggaacccctgtagggaaggggcaggagagccaggggcatgagatggtggacgaggaagggggacagggaagcctgagcgcctctcctgggcttgccaaggactcaaacccagaagcccagagcagggccttagggaagcgggaccctgctctgggcggaggaatatgtcccagatagcactggggactctttaaggaaagaaggatggagaaagagaaagggagtagaggcggccacgacctggtgaacacctaggacgcaccattctcacaaagggagttttccacacggacacccccctcctcaccacagccctgccaggacggggctggctactggccttatctcacaggtaaaactgacgcacggaggaacaatataaattggggactagaaaggtgaagagccaaagttagaactcaggaccaacttattctgattttgtttttccaaactgcttctcctcttgggaagtgtaaggaagctgcagcaccaggatcagtgaaacgcaccagacggccgcgtcagagcagctcaggttctgggagagggtagcgcagggtggccactgagaaccgggcaggtcacgcatcccccccttccctcccaccccctgccaagctctccctcccaggatcctctctggctccatcgtaagcaaaccttagaggttctggcaaggagagagatggctccaggaaatgggggtgtgtcaccagataaggaatctgcctaacaggaggtgggggttagacccaatatcaggagactaggaaggaggaggcctaaggatggggcttttctgtcaggtaccgtcaaggctgcagtgagacatgatcttgccactgcactccagcctggacagcagagtgaaaccttgcctcacgaaacagaatacaaaaacaaacaaacaaaaaactgctccgcaatgcgcttccttgatgctctaccacataggtctgggtactttgtacacattatctcattgctgttcataattgttagattaattttgtaatattgatattattcctagaaagctgaggcctcaagatgataacttttattttctggacttgtaatagctttctcttgtattcaccatgttgtaactttcttagagtagtaacaatataaagttattgtgagtttttgcaaacacagcaaacacaacgacccatatagacattgatgtgaaattgtctattgtcaatttatgggaaaacaagtatgtactttttctactaagccattgaaacaggaataacagaacaagattgaaagaatacattttccgaaattacttgagtattatacaaagacaagcacgtggacctgggaggagggttattgtccatgactggtgtgtggagacaaatgcaggtttataatagatgggatggcatctagcgcaatgactttgccatcacttttagagagctcttggggaccccagtacacaagaggggacgcagggtatatgtagacatctcattctttttcttagtgtgagaataagaatagccatgacctgagtttatagacaatgagcccttttctctctcccactcagcagctatgagatggcttgccctgcctctctactaggctgactcactccaaggcccagcaatgggcagggctctgtcagggctttgatagcactatctgcagagccagggccgagaaggggtggactccagagactctccctcccattcccgagcagggtttgcttatttatgcatttaaatgatatatttattttaaaagaaataacaggagactgcccagccctggctgtgacatggaaactatgtagaatattttgggttccatttttttttccttctttcagttagaggaaaaggggctcaggatccacttgcccagtgttcttccttagttcctaccttcgaccttgatcctcctttatcttcctgaaccctgctgagatgatctatgtggggagaatggcttctttgagaaacatcttcttcgttagtggcctgcccctcattcccactttaatatccagaatcactataagaagaatataataagaggaataactcttattataggtaagggaaaattaagaggcatacgtgatgggatgagtaagagaggagagggaaggattaatggacgataaaatctactactatttgttgagaccttttatagtctaatcaattttgctattgttttccatcctcacgctaactccataaaaaaacactattattatctttattttgccatgacaagactgagctcagaagagtcaagcatttgcctaaggtcggacatgtcagaggcagtgccagacctatgtgagactctgcagctactgctcatgggccctgtgctgcactgatgaggaggatcagatggatggggcaatgaagcaaaggaatcattctgtggataaaggagacagccatgaagaagtctatgactgtaaatttgggagcaggagtctctaaggacttggatttcaaggaattttgactcagcaaacacaagaccctcacggtgactttgcgagctggtgtgccagatgtgtctatcagaggttccagggagggtggggtggggtcagggctggccaccagctatcagggcccagatgggttataggctggcaggctcagataggtggttaggtcaggttggtggtgctgggtggagtccatgactcccaggagccaggagagatagaccatgagtagagggcagacatgggaaaggtgggggaggcacagcatagcagcatttttcattctactactacatgggactgctcccctatacccccagctaggggcaagtgccttgactcctatgttttcaggatcatcatctataaagtaagagtaataattgtgtctatctcatagggttattatgaggatcaaaggagatgcacactctctggaccagtggcctaacagttcaggacagagctatgggcttcctatgtatgggtcagtggtctcaatgtagcaggcaagttccagaagatagcatcaaccactgttagagatatactgccagtctcagagcctgatgttaatttagcaatgggctgggaccctcctccagtagaaccttctaaccagctgctgcagtcaaagtcgaatgcagctggttagactttttttaatgaaagcttgcatgcagcactttgggaggctgaggtgggtggactgcttggagctcaggagttcaagaccatcttggacaacatggtgataccctgcctctacaaaaagtacaaaaattagcctggcatggtggtgtgcacctgtaatcccagctattagggtggctgaggcaggagaattgcttgaacccgggaggcggaggttgcagtgagctgagatcgtgccactgcactccagcctgggggacagagcacattataattaactgttattttttacttggactcttgtggggaataagatacatgttttattcttatttatgattcaagcactgaaaatagtgtttagcatccagcaggtgcttcaaaaccatttgctgaatgattactatactttttacaagctcagctccctctatcccttccagcatcctcatctctgattaaataagcttcagtttttccttagttcctgttacatttctgtgtgtctccattagtgacctcccatagtccaagcatgagcagttctggccaggcccctgtcggggtcagtgccccacccccgccttctggttctgtgtaaccttctaagcaaaccttctggctcaagcacagcaatgctgagtcatgatgagtcatgctgaggcttagggtgtgtgcccagatgttctcagcctagagtgatgactcctatctgggtccccagcaggatgcttacagggcagatggcaaaaaaaaggagaagctgaccacctgactaaaactccacctcaaacggcatcataaagaaaatggatgcctgagacagaatgtgacatattctagaatatattatttcctgaatatatatatatatatacacatataccatatgaaacacctctaggctataaggcaacagagctccttttttttttttctgtgctttcctggctgtccaaatctctaatgataagcatacttctattcaatgagaatattctgtaagattatagttaagaattgtgggagccattccgtctcttatagttaaatttgagcttcttttatgatcactgtttttttaatatgctttaagttctggggtacatgtgccatggtggtttgctgcacccatcaacccgtcatctacattaggtatttctcctaatgctatccttcccctagccccccacccccaacaggccccagtgtgtgatgttcccctccctgtgtccatggatcactggtttttttttgttttttttttttttttaaagtctcagttaaatttttggaatgtaatttattttcctggtatcctaaggacttgcaagttatctggtcactttagccctcacgttttgatgataatcacatatttgtaaacacaacacacacacacacacacacacacatatatatatatataaaacatatatatacataaacacacataacatatttatcgggcatttctgagcaactaatcatgcaggactctcaaacactaacctatagccttttctatgtatctacttgtgtagaaaccaagcgtggggactgagaaggcaatagcaggagcattctgactctcactgcctttagctaggcccctccctcatcacagctcagcatagtcctgagctcttatctatatccacacacagtttctgacgctgcccagctatcaccatcccaagtctaaagaaaaaaataatgggtttgcccatctctgttgattagaaaacaaaacaaaataaaataagcccctaagctcccagaaaacatgactaaaccagcaagaagaagaaaatacaataggtatatgaggagactggtgacactaagtgtctgaatgaggcttgagtacagaaaagaggctctagcagcatagtggtttagaggagatgtttctttccttcacagatgccttagcctcaataagcttgcggttgtggaagtttacttgtttatcaccggtgacgtccatgagcaaattaagaaaaacaacaacaaatgaatgcatatatatgtatatgtatgtgtgtatatatacacatatatatatatattttttttcttttcttaccagaaggttttaatccaaataaggagaagatatgcttagaactgaggtagagttttcatccattctgtcctgtaagtattttgcatattctggagacgcaggaagagatccatctacatatcccaaagctgaattatggtagacaaaactcttccacttttagtgcatcaatttcttatttgtgtaataagaaaattgggaaaacgatcttcaatatgcttaccaagctgtgattccaaatattacgtaaatacacttgcaaaggaggatgtttttagtagcaatttgtactgatggtatggggccaagagatatatcttagagggagggctgagggtttgaagtccaactcctaagccagtgccagaagagccaaggacaggtacggctgtcatcacttagacctcaccctgtggagccacaccctagggttggccaatctactcccaggagcagggagggcaggagccagggctgggcataaaagtcagggcagagccatctattgcttacatttgcttctgacacaactgtgttcactagcaacctcaaacagacaccatgggtcatttcacagaggaggacaaggctactatcacaagcctgtggggcaaggtgaatgtggaagatgctggaggagaaaccctgggaaggtaggctctggtgaccaggacaagggagggaaggaaggaccctgtgcctggcaaaagtccaggtcgcttctcaggatttgtggcaccttctgactgtcaaactgttcttgtcaatctcacaggctcctggttgtctacccatggacccagaggttctttgacagctttggcaacctgtcctctgcctctgccatcatgggcaaccccaaagtcaaggcacatggcaagaaggtgctgacttccttgggagatgccataaagcacctggatgatctcaagggcacctttgcccagctgagtgaactgcactgtgacaagctgcatgtggatcctgagaacttcaaggtgagtccaggagatgtttcagccctgttgcctttagtctcgaggcaacttagacaactgagtattgatctgagcacagcagggtgtgagctgtttgaagatactggggttgggggtgaagaaactgcagaggactaactgggctgagacccagtggtaatgttttagggcctaaggagcgcctctaaaaatctagatggacaattttgactttgagaaaagagaggtggaaatgaggaaaatgacttttattagattccagtagaaagaactttcatctttccctcatttttgttcgttttaaaacatctatctggaggcaggacaagtatggtcgttaaaaagatgcaggcagaaggcatatattggctcagtcaaagtggggaactttggtggccaaacatacattgctaaggctattcctatatcagctggacacatataaaatgctgctaatgcttcattacaaacttatatcctttaattccagatgggggcaaagtatgtccaggggtgaggaacaattgaaacatttgggctggagtagattttgaaagtcagctctgtgtgtgtgtgtgtgtgcgcgcgcgcgtgtgtgtgtgtgtgtgtcaacgtgtgtttcttttaacgtcttcagcctacaacatacagggttcatggtggcaagaagatagcaagatttaaattatggccagtgactagtgcttgaaggggaacaactacctgcatttaatgggaaggcaaaatctcaggctttgagggaagttaacataggcttgattctgggtagaagctgggtgtgtagttatctggaggccaggctggagctctcagctcactatgggttcatctttattgtctcctttcatctcaacagctcctgggaaatgtgctggtgaccgttttggcaatccatttcggcaaagaattcacccctgaggtgcaggcttcctggcagaagatggtgactgcagtggccagtgccctgtcctccagataccactgagcctcttgcccatgattcagagctttcaaggataggctttattctgcaagcaattcaaataataaatctattctgctgagagatcacacatgattttcttcagctcttttttttacatctttttaaatatatgagccacaaagggtttatattgagggaagtgtgtatgtgtatttctgcatgcctgtttgtgtttgtggtgtgtgcatgctcctcatttatttttatatgagatgtgcattttgttgagcaaataaaagcagtaaagacacttgtacacgggagttctgcaagtgggagtaaatggtgtaggagaaatccggtgggaagaaagacctctataggacaggacttctcagaaacagatgttttggaagagatgggaaaaggttcagtgaagacctgggggctggattgattgcagctgagtagcaaggatggttcttaatgaagggaaagtgttccaagctttaggaattcaaggtttagtcaggtgtagcaattctattttattaggaggaatactatttctaatggcacttagcttttcacagcccttgtggatgcctaagaaagtgaaattaatcccatgccctcaagtgtgcagattggtcacagcatttcaagggagagacctcattgtaagactctgggggaggtggggacttaggtgtaagaaatgaatcagcagaggctcacaagtcagcatgagcatgttatgtctgagaaacagaccagcactgtgagatcaaaatgtagtgggaagaatttgtacaacattaattggaaggcttacttaatggaatttttgtatagttggatgttagtgcatctctataagtaagagtttaatatgatggtgttacggacctaatgtttgtgtctcctcaaaattcacatgctgaatccccaactcccaactgaccttatctgtgggggaggcttttgaaaagtaattaggtttagatgagctcataagagcagatccccatcataaaattattttccttatcagaagcagagagacaagccatttctctttcctcccggtgaggacacagtgagaagtccgccatctgcaatccaggaagagaaccctgaccacgagtcagccttcagaaatgtgagaaaaaactctgttgttgaagccacccagtcttttgtattttgttatagcaccttgcactgagtaaggcagatgaagaaggagaaaaaaataagcttatcgaaacgcgtccccatcctcactgactccgtcctggagttggatgagagataatggccttacgttgtgccaggggagggtcgggctggatttagcaagatttaccttctccaaagagcggtgctgcagtggcacagctgcccacggaggtgggggggtcaccgtccctggaggtgatgaagaactgtggggatgtggcactgagggacatggccagtgggcacggtgggtgggttggggttggtcttggggatcttggagggcttttccagccttcatgatttgacgattgtatgaacatctacatggcaattctccagctgcctgtcccagtcctactgacccagctgtatctctccaggcaagctcttccaccccttctgcttgcatccagacaccatcaaacatgcaggctcagacacagggaccagcagtgtctgtggcctttttgtgctcctctccatgctgggttttaacttgctctttgtccttctatcctatcttcttatccttaaggctgttctgaacgctgtgacttggagagtgtcccagagccctcaacacctgcatgtcccacgtccatgctgtcctgcacttccttatccccaagatctgcctctccgtgatgcactgaattggcaaacatgtgtcaccccagaccaacaatgtcacagcaaactcccccttgataggacaagggggaatggctttacactgagacaggggaggtttgggttggatatgaggaggcagtttttcccccagagggtggtgacgcactgaacaggttgcccaaggaggctgtggatgccccatccctgcaggcattcaaggccaggctggatgtggctctgggcagcctgggctgctggttgatgaccctgcacatagcagggggttggatctggatgagcactgtgctcctttgcaacccaggccgttctatgattctgtcattctaaatctctctttcagcctaaagctttttccccgtatccccccaggtgtctgcaggctcaaagagcagcgagaagcgttcagaggaaagcgatcccgtgccaccttccccgtgcccgggctgtccccgcacgctgccggctcggggatgcggggggagcgccggaccggagcggagccccgggcggctcgctgctgccccctagcgggggagggacgtaattacatccctgggggctttgggggggggctgtccctatcgattactagttttaccacatttgtagaggttttacttgctttaaaaaacctcccacacctccccctgaacctgaaacataaaatgaatgcaattgttgttgttaacttgtttattgcagcttataatggttacaaataaagcaatagcatcacaaatttcacaaataaagcatttttttcactgcattctagttgtggtttgtccaaactcatcaatgtatcttatcatgtctgctcgaagagcggccgcttcagtttcggccagcaggcggggagcccgaggtagctcccgctcccttgagccaggcccctgccagacctgagctccctcccaagcctggcttccccaaccggtggccttcatgggccagaagccattccttcacggctagccctccggagtagttgcccacggctccgctgctgcagaccactctgtggcacgggatgaggatcttgacaggattgcctctcatggcgcctcccactgctcgcgcggctttggggttgccggccagggcggccaattgctggtaagaaatcacttctccgaatttcacaaccttaagcagcttccataacacctgacgcgtgaacgactcttgctggaaaacgggatggtgaagcgctggcacggggaactcttcgatagcctcgggctggtggaaataggcattcagccaggctgtgcactgcatcaggggctccggacctccgagaaccgcagcgggggctgggacctccacggcatcagctgcagacgtccccttgcccaggagctttatttcgtgcagaccctgctcacaaccagacagctccagcttccccaaagggctgtccagtgtggtgcgtttcatttcacaatccttgtccatggtggcgaccgtctagctcacgacacctgaaatggaagaaaaaaactttgaaccactgtctgaggcttgagaatgaaccaagatccaaactcaaaaagggcaaattccaaggagaattacatcaagtgccaagctggcctaacttcagtctccacccactcagtgtggggaaactccatcgcataaaacccctccccccaacctaaagacgacgtactccaaaagctcgagaactaatcgaggtgcctggacggcgcccggtactccgtggagtcacatgaagcgacggctgaggacggaaaggcccttttcctttgtgtgggtgactcacccgcccgctctcccgagcgccgcgtcctccattttgagctccctgcagcagggccgggaagcggccatctttccgctcacgcaactggtgccgaccgggccagccttgccgcccagggcggggcgatacacggcggcgcgaggccaggcaccagagcaggccggcgagcttgagactacccccgtccgattctcggtggccgcgctcgcaggccccgcctcgccgaacatgtgcgctgggacgcacgggccccgtcgccgcccgcggccccaaaaaccgaaataccagtgtgcagatcttggcccgcatttacaagactatcttgccagaaaaaaagcgtcgcagcaggtcatcaaaaattttaaatggctagagacttatcgaaagcagcgagacaggcgcgaaggtgccaccagattcgcacgcggcggccccagcgcccaggccaggcctcaactcaagcacgaggcgaaggggctccttaagcgcaaggcctcgaactctcccacccacttccaacccgaagctcgggatcaagaatcacgtactgcagccaggggcgtggaagtaattcaaggcacgcaagggccataacccgtaaagaggccaggcccgcgggaaccacacacggcacttacctgtgttctggcggcaaacccgttgcgaaaaagaacgttcacggcgactactgcacttatatacggttctcccccaccctcgggaaaaaggcggagccagtacacgacatcactttcccagtttaccccgcgccaccttctctaggcaccggttcaattgccgacccctccccccaacttctcggggactgtgggcgatgtgcgctctgcccactgacgggcaccggagcctcacgcatgctcttctccacctcagtgatgacgagagcgggcgggtgagggggcgggaacgcagcgatctctgggttctacgttagtgggagtttaacgacggtccctgggattccccaaggcaggggcgagtccttttgtatgaattactcaaatcgataactagtgatatcctagtggccccactgtggggtggaggggacagataaaagtacccagaaccagagccacattaaccggccctgggaatataaggtggtcccagctcggggacacaggatccctggaggcagcaaacatgctgtcctgaagtggacataggggcccgggttggaggaagaagactagctgagctctcggacccctggaagatgccatgacagggggctggaagagctagcacagactagagaggtaaggggggtaggggagctgcccaaatgaaaggagtgagaggtgacccgaatccacaggagaacggggtgtccaggcaaagaaagcaagaggatggagaggtggctaaagccagggagacggggtactttggggttgtccagaaaaacggtgatgatgcaggcctacaagaaggggaggcgggacgcaagggagacatccgtcggagaaggccatcctaagaaacgagagatggcacaggccccagaaggagaaggaaaagggaacccagcgagtgaagacggcatggggttgggtgagggaggagagatgcccggagaggacccagacacggggaggatccgctcagaggacatcacgtggtgcagcgccgagaaggaagtgctccggaaagagcatccttgggcagcaacacagcagagagcaaggggaagagggagtggaggaagacggaacctgaaggaggcggcagggaaggatctgggccagccgtagaggtgacccaggccacaagctgcagacagaaagcggcacaggcccaggggagagaatgcaggtcagagaaagcaggacctgcctgggaaggggaaacagtgggccagaggcggcgcagaagccagtagagctcaaagtggtccggactcaggagagagacggcagcgttagagggcagagttccggcggcacagcaagggcactcgggggcgagaggagggcagcgcaaagtgacaatggccagggccaggcagatagaccagactgagctatgggagctggctcaggttcaggagagggcagggcagggaaggagacaaagtccaggaccggctggaggggctcaacatcggaagaggggaagtcgagggagggatggtaaggaggactgcatgggtcagcacaggctgccaaagccagggccagttaaagcgactccaatgcggaagagagtaggtcgaaggggaatggtaaggaggcctggggcagagtggtcagcacagagtggctaagcccagggccagttgaagcggctccaattcggaagtggggtggtcgaaggggaatggtaagggggactgggacggggtgtcagcatagggtggcaaagcccagggccaggaacgacggggcggatcgagactggcaacggggaaggaggatgccccaggtggcgcagcagagggtggacctggccccgggagacgccgggcggggggcgctgacctggtgcagggcgctgataccgtcggcgttggtggagtccagcacggcgcgggcgggcggcggcgcggcggggtcgagctcggcgccggggccagggtcggcggcgcgcagcatcagacgcgcctcgtccaggtcgccgcccgcacaggccgccaggaactcggcggcgcgctcgaagcggacggtgcgggcgcggcgctctccggggccaggctcggcgcccgcccgcgccccccactgccgcagctgctcccgtcgccgctcccgggcagccgccgccgccgcccccgggccagccgccgggccatcctctccggacatcgcaccgcccgcccgcccagcgagcgagcgagcgccgagccccaaccgccgccaccaccccaatcctgtccctagtggccccgatatcattaagtggcaggattaatcttcgaacgaaggagccatccaactaaccgtcatgttcgggcaaccgaagaagggagtggcaggatttcctttggagacttctggaattagacagcagtttaatgcaagcatctaaattctcttcctcccagagtctcattaaaactacagtaagagtttgtgttttgttttgtttttaaagacaaaatcccaccaggatagagagaataggagaggagataacagcatcataatttatgaaactaaaatgcagatagaccaggattaactgactacacagcaccaaggaagctgaatcacaagacagcagaggagaaaactggaaaggatcgtggtctatacggcagaatcttcccaagcctcaggaggaggagctctagatgttcccagatctgggaggtaaagtggaatggggggacatggtcagcgtaatggggttgggctggaagctggttaaggagcaggcagatctctgaatcccctctctgactctgtgtccccaggcatctgcctgtcccccaccctggaagaggtctggcttgaccctttgtctggtgaatttcctgctctgctttcctggtcctgctggccagatcagtggaggccactcacttcaccccacagggatgttctgtgttgccctacacctgggaactggaggtactggaggcaggctgtggtgagcttgaaagcaaaacacagagggcagtccaatctctttggccatatttcttctgcatatccaataccatgtccacaactctgctagtgtcctgatggtggtgggctctacacattcccgggaagctgaaggcagataatgaccaggacaggtcaacctctcttcttctgaaagccttcatctactaatggcctgggactcttcccttaaatgcttagattgtgtcttccactaaggttttttgctgttgctgttgtttgtttgtttgtttgtttgtttgtttgttttgagacggaatctcactctgtcgcccaggctggagtgtagtggcacaatctcagctcaccacaaccttcacctcctaggttgaagggattctcctgcctcagcctcctgagtagctaggattacaggcacatgccaccatgcctggctaatttttgtatttttagtagagacaggatttcgccatgttggccaggctggtcttgaactcctgacctcaggtgatctgcctaccttggtctcccaaagtgctgggattactggtgtgagccaccacacccggccaaggtttttgtttgtttgtttgtttgtttgttttgtattgaggcagggtatcactctggtcacccaggctggagtgcagtagtgcaatcacggctcactgaaacctccacctccctggcgggctcaggtgatcctgccacctcagcttcccaggtagctgggactacaggcttgtaccaccactcccagctaatttttgcgtttttagtagagacagggtttccccatgttgcccaggttggtctcaaactctgggctcaagcgatctgcctgcctcagcctcccaaagtgctgggattacaggtgtaagccaccgtacccggccccgccactaaggttttgaaaatgaagcaattacaagtttaagtctattaataagtgatgaagctatgtagaaaagcagaataattatcttggatcaggaaggtcacatgaggatctacttgggggttgtcaatattctatttcttgacctgatcagtgttgacagcaggttttaattttttacttctttttgtttgtttgtttttgagacggagtcttgctctgtctcccaggctggagtgcagtggtatgatctcggctcactgcaacctccgcctcctgggttcaagctgttctcctgcctcagcctccccagtagctgggattacaggcaggcaccaccacgaccagctaatttttgtatttttagtagagactgggtttcaccatcttggccaggctggtctcgaacttctgatctcgtgatccgccctccttggcctcccaaagtgctgggattacaggcttgagccagcgtgcccggcccattttttacttccttattaaactgtacatataggccttgcacacttttctgcatcaatgttatattccacaataaagggaaaaggtatatacacaacttgataccagtaatgtgaaacatatatttctacatagaaaaaaaaatgactgaaatactgcactccaatgtgttcacacagtagttgtttctggattatttatatattaaatgtttatatattgtattatgccatgaggtttgtgttttctctccacttttctgcattttccaagtttactacaaagagcacatattactcttataatcagaaagtcataaaatatatttaaaaagacaaaattgaaactaataaggatcaacacaaaacagatgagccatctgtggaaatccgcacagaatactacctaaagagattggtgacgtgcatgatctcactaggatgagcacaaagcttgccagagcctagggtctatttctagggttggctcttggaagccaggatagttgttatctctgggaagagggaggggcacacaaggggcttctaaaacattctgaatgttctatttctgaacctggttggtgggtacatgactgttggttttattattatatgttttatatactcttccgtatgtatggtgtggattccaaaaaaagatttcctttagagaaaaccagaatcacataagtagaaaatatggtgctatgttgaaggaacaactcaagtttatataaaatcatcatcatttataggcttaaaaagttgctttggaattttggtctaactgacttgtcttttctgcagcaaaccacgctccttctggacgtgctccaggcagaggggattagggtgggttcaaggctgcaagtacctagctcagcacactctcttcaggggacttagagtttgtctggtgttggctctctgagctcttgtcaggaatgccgacccttccgaggttcaggatttgaagcctgccttcccaccccagatttggtccacacagacactcaagtatgtatttcaactacaaatgacctgtactttcctattactcctctctttcatggtaacctttctggtatccttccttccctacatttatgggagggggacatcattctctgctctcctgtcactgaaggctccaccttctgtcttcttctgacccatctggttttcctggggccacctcctctccttaccaccctaacgcttttgtaacttgaggagaaatgagagatcacctagtcaggtcatcattctctgtagatgaagaggcccaatggtttgctcaagaattgccaagcgagttaaagacagagagtatgagagtcagcaagacctacagaaagcatctatctgcactgttttgcagggacttagcctttgtgtgtggactcctggaatgccacccactaagaaacattgtctgacaccaactccccacttggtaggtggggacactgaaactcatggcaggaaagggccttgccccaagccagggcagagtgtcactcatcactctcaattttcagtccagggcaccttgttgtgactatcccaaaggcagccactttccctggtctgaaagacctgaagagagaagagaagagaaggatggaaggcagagtatgcggctttgattcatttcctggtgaaaacagatctatacgagaagcaaatttcacgaaagggaagagaagaaagtgtcccatacgttgctggcctgtttcaaccttgctttgattcttgctgaaaagggtaccgtgtatttctgagttcaacatgcagaccagtgttaggaaagccactgcacctccactttagcctccagggctgtgccctgcaaatggcctgcagccttggtgcctcgctctccagactgcattttggaagatgggacagaggcttatggaagcccacattagaacgggggagcagaatgggtgagatgagggatccttgatagtgaaccagatgaaggaatggtagccaaatgccaggcctcctttgtggcttcaatccaaaggctctggagcccttccagggcagaacatcaggcatgtttacccccactgtcctcaacagtgacagaggtgcaatcttgggcagctggccattttgaaagcaacctccttaatctcaactgggaaggctccctagcaggacccctgtgttgcacacctggaggaagctagactaaccagaagctcagcacggttccatctgggatgcccaggtctgagacgaaaaaggtaactctcttttctgggtcctggcccagttgtgtctctctccacctcattctctgagatgcctgtctccccttttttgtcccatcaggaggcaagagctatcactgggccagactccaccagaagccaagccagcttgttacccagcttctcagggagcaaagaacagccttgtttctatcttatccccactgtcccctgcccctgccccacctcccagccattcagcttctggcttccccagagctgcctgcttctttgtggtcctccattccttgaaaagaccttctagtcattagtgtatataaatggccacttagcccagattacagtgaggtcaacagctggggctctgagaattgtcacacactggcacaggagaggaggctattcttccagagaatttggagggcactcccatccacttacaacaaaaagcccatccactgtgcttggcagtaggtgatctgagaaccaatggaaccaggttaatcctgtggcactgttgagtgaggagagcagtggcgggcactggaaaatatcagagacaaggcaggagacctgaaatctaggcttagctcctcatatacttggcagctgtatgacctcagacaaccagtgttacctctctaagcctcagtttcctcatgcaaaaggagggggaataacaacagagcccactgcttgggggtgttgtgaggacaggatgaaaaaacaaacagaaatccctcagtacaggattcagtgcagtggacagtcttgcaaggtctggttcagccctccacccctaccctcaccagtataaagaactctggcctacaagtcagatgacctgagttttaatctcagctttgccattagccgtgtgaacttgagaaagtccctttcctttttacatctattgggatgatcatgcattttttgtcctttattctgttaatatagtgtgttacattgattgcttttcatagactgaaccagccttgtattccagggataaatctcacttggtcatggtgtataatcctttatacaaatgttgctgggttgagtttgctagtattttgttgaagatttttatgtcttgattcataaggaatattggtgtaccttccccttttatggccacagtttccctacaatgatgtagtcgaactagacaacctccaatatctttcagtattcatgtcctctgattctgtgaaactaagaaaattaagaaatagtgattcataggcacaaggcaggcaaaacttagactccttgtagaataattaggaagccaaatattcagtgtgcttatttctcaaataaccttagtttctccagtctgccccaactccgaggcctgaatatctctagatgcttatgatggcaactaaagcctaaaagctaattcattttaaagttcttccaaatgcatagggttttatttttccagacctgggttcagatggggaatttgacaaacaatggaaagggggaaaaacaacaatctaaacactgagtgacaaagtaacaaagaaatagtctagctatcagccagtcaagccagccttggctttgctatccaaagtagtcagtctaattctaccaccagtttctgttcctgtagctgtctactgcctgccagggactctgccttcccacccacaactaccaatggaaggatgtggtgaccataccagtggctgctgacatctcctgccatgggaagcataattgcctccagcagcctcccccttagatccatcatttttgttgcacttggcctgggctgtactcccggccaatgactgaacatggtgagcatagtaatgcaggcccatttctgtgaggagcaggactcctccagtaggtgactttggctcaaggactctctattggcctggttgaacttttcctgaactgtgctactgtctgagactcttcttacccaatcctctttctcgccccaattgtcacagaccacctgcattgtggtctgagtctctccccaccttctcttgctcttccctgtttatctttcacaggcatttcccccagtacattccttgaatgtctaacccgatacgggtgcctgacttttggcagacctaagcagacaaaaaggagtacttggttacctagctcttctttctaccacaaacatcgagggaaccctttttccctcacccctctgccacacccccactgccccagtgaacaaccacagagagagctgtggtataatattaggctggtgcaaaagtaattgcggtttttgccattacttttaatggtaaaaaccgcaattacttttgcacctacctagtatttgtgtccccccaaattcatatgttgaaacctaacccacaatatgatgtcattaggaggcaagaccttgaggaggtgattagatgatggggtggagctctcctgaatgagattagtgcccttataagaagaagcccaaggaagctaccttgactcttccatcacatgagaatgcagcaagaaggcaccatctactaatcaggaagagagctctcaccagacactgaatctgccagtgtcttgatcttgaagttcccagcctccagaactatgcataatgcatttccattgtctctaagccacccagcctatggtattttgtcatagcagcctgaactgactaagacagtgagccacatgagaagtgccccaacccctcccttaagcacttggctcacagatcagtgggttcatttctgcctgagttttattgttattctgtagatttcttgggctagatatatttttctgttattttccttcttcacctcagtcatgaattggttgttttaaaaaagacaatgtaagtcatggggaaactcctgacaactctactctcctagggttcctgataaaaggggattcagttgagtcctctgatggtctctacctgccaaagtccagcagcccttagcaaacatgctgctcgtttctgtagagaaggtgctggtgtcccaccatacttctctctccctcatgaagggcttgcgacccagcaaatgggtggcttatatgggtctgtttcaaaggaagagccagctctgggaagaaaaacgatgagcataagcataacctaccactgtgcctgggaaagcagacaacttttttgatgtgtgaatatctaatgagaatggaatccatcaattaccttaaacttaggcacagtcttcaaattcaatatatgtgggatatacttttagtcagtttgtagacgttatttgtaataaataatctggcttctctaaagaaattattttaagtgtttggtttggtttgatttaatggtaaaattatatttagtggcagagaattatagcaatggtgataaactatagagtgtcataagttcatatcttattctcacatttgaagctgcctgcagatgcattcaagatgcagccagaagtcaggagactcaggctgttatttggagctcatcattttacagccttgctggactcccactttctcaggggaaaaatgtggtgttgacccagattagctctccaggccctgctgagttgggcactctgtaagctggagggtcttctattgtcttcacctaagtgtcaatcaacaacccaaatgggcatgggggaagagggagctgggccaatgcccagggtgcctggtagagagataccttgggcactggaaggcaccagcttcccagagagaagggggagggccatgaaaaagttggctgtagatgccagggacactgggactctccagctgtgtgtttgtgtcttctgaagacttatgtttcattcctttggagcatgcataatcatacactgtgggatgtgttatatagattgcttgatagttcaccactgtaataaaatactgtgactggaatctgctcccagtctgcctttgatagcacttgtgcaacacacatttactgagcatttacagtgatccaggacctgtgttgtgaaaacattgatggacaaggcagatggtggagcacgtcagtgaggatttttaacaaaggctggtaagtgctataaaggaacattgtaggacactagagaacaaagaacaggagaacctgacttaggctggggtggggcgttggttagaggaggctccttggaggacatgaggtttaagctgtgacctgaggatgaatagatgttggccaggtgaggttaatctggggctcaagatcgagcattaagcttgtcagccttaccagtaaaaaagaaaacctattaaaaaaacaccactcgacacggcaccagctcaatcagtcacagtgtaaaaaagggccaagtgcagagcgagtatatataggactaaaaaatgacgtaacggttaaagtccacaaaaaacacccagaaaaccgcacgcgaacctacgcccagaaacgaaagccaaaaaacccacaacttcctcaaatcgtcacttccgttttcccacgttacgtaacttcccattttaagaaaactacaattcccaacacatacaagttactccgccctaaaacctacgtcacccgccccgttcccacgccccgcgccacgtcacaaactccaccccctcattatcatattggcttcaatccaaaataaggtatattattgatgatgtttaaactacggcccggtacccagcttttgttccctttagtgagggttaattgcgcgcttggcgtaatcatggtcatagctgtttcctgtgtgaaattgttatccgctcacaattccacacaacatacgagccggaagcataaagtgtaaagcctggggtgcctaatgagtgagctaactcacattaattgcgttgcgctcactgcccgctttccagtcgggaaacctgtcgtgccagctgcattaatgaatcggccaacgcgcggggagaggcggtttgcgtattgggcgctcttccgcttcctcgctcactgactcgctgcgctcggtcgttcggctgcggcgagcggtatcagctcactcaaaggcggtaatacggttatccacagaatcaggggataacgcaggaaagaacatgtgagcaaaaggccagcaaaaggccaggaaccgtaaaaaggccgcgttgctggcgtttttccataggctccgcccccctgacgagcatcacaaaaatcgacgctcaagtcagaggtggcgaaacccgacaggactataaagataccaggcgtttccccctggaagctccctcgtgcgctctcctgttccgaccctgccgcttaccggatacctgtccgcctttctcccttcgggaagcgtggcgctttctcatagctcacgctgtaggtatctcagttcggtgtaggtcgttcgctccaagctgggctgtgtgcacgaaccccccgttcagcccgaccgctgcgccttatccggtaactatcgtcttgagtccaacccggtaagacacgacttatcgccactggcagcagccactggtaacaggattagcagagcgaggtatgtaggcggtgctacagagttcttgaagtggtggcctaactacggctacactagaaggacagtatttggtatctgcgctctgctgaagccagttaccttcggaaaaagagttggtagctcttgatccggcaaacaaaccaccgctggtagcggtggtttttttgtttgcaagcagcagattacgcgcagaaaaaaaggatctcaagaagatcctttgatcttttctacggggtctgacgctcagtggaacgaaaactcacgttaagggattttggtcatgagattatcaaaaaggatcttcacctagatccttttaaattaaaaatgaagttttaaatcaatctaaagtatatatgagtaaacttggtctgacagttaccaatgcttaatcagtgaggcacctatctcagcgatctgtctatttcgttcatccatagttgcctgactccccgtcgtgtagataactacgatacgggagggcttaccatctggccccagtgctgcaatgataccgcgagacccacgctcaccggctccagatttatcagcaataaaccagccagccggaagggccgagcgcagaagtggtcctgcaactttatccgcctccatccagtctattaattgttgccgggaagctagagtaagtagttcgccagttaatagtttgcgcaacgttgttgccattgctacaggcatcgtggtgtcacgctcgtcgtttggtatggcttcattcagctccggttcccaacgatcaaggcgagttacatgatcccccatgttgtgcaaaaaagcggttagctccttcggtcctccgatcgttgtcagaagtaagttggccgcagtgttatcactcatggttatggcagcactgcataattctcttactgtcatgccatccgtaagatgcttttctgtgactggtgagtactcaaccaagtcattctgagaatagtgtatgcggcgaccgagttgctcttgcccggcgtcaatacgggataataccgcgccacatagcagaactttaaaagtgctcatcattggaaaacgttcttcggggcgaaaactctcaaggatcttaccgctgttgagatccagttcgatgtaacccactcgtgcacccaactgatcttcagcatcttttactttcaccagcgtttctgggtgagcaaaaacaggaaggcaaaatgccgcaaaaaagggaataagggcgacacggaaatgttgaatactcatactcttcctttttcaatattattgaagcatttatcagggttattgtctcatgagcggatacatatttgaatgtatttagaaaaataaacaaataggggttccgcgcacatttccccgaaaagtgccacctgacgcgccctgtagcggcgcattaagcgcggcgggtgtggtggttacgcgcagcgtgaccgctacacttgccagcgccctagcgcccgctcctttcgctttcttcccttcctttctcgccacgttcgccggctttccccgtcaagctctaaatcgggggctccctttagggttccgatttagtgctttacggcacctcgaccccaaaaaacttgattagggtgatggttcacgtagtgggccatcgccctgatagacggtttttcgccctttgacgttggagtccacgttctttaatagtggactcttgttccaaactggaacaacactcaaccctatctcggtctattcttttgatttataagggattttgccgatttcggcctattggttaaaaaatgagctgatttaacaaaaatttaacgcgaattttaacaaaatattaacgcttacaatttccattcgccattcaggctgcgcaactgttgggaagggcgatcggtgcgggcctcttcgctattacgccagctggcgaaagggggatgtgctgcaaggcgattaagttgggtaacgccagggttttcccagtcacgacgttgtaaaacgacggccagtgagcgcgcgtaatacgactcactatagggcgaattggagctccactacgtagtttaaa

SEQ ID NO: 60 - DNA, 33055 bp, Artificial Sequence
  pHCA-Dual2-FI-globin-mgmtGFP
ggccgaaggattacatgagcttagaaatgtaattagcatagtgtgtggcatagtgtagataccaaataaatatgatctctccttctactcttgaaaatgcaaacacattcttggtggtcctaaaatagcctgtaacatggtttactcagcagcatttgctattcaaggcagatctgcctttagtcattggctgcgctcctgaacagctgtgtgaaaggctaacttttgtaaaccaaatcaaaataaaatgcagcaaaaatttgtcactgaaaggaaatcctcagtatatccttttatgaaatgaaagatccctcatccaaacttaacttttttaaaagtgcgcatttggagatatagccctttcttatgaatcctaattcaattttggccataaacacacgttgatgttccccaccccaaagcacatagcaacaagagtaggttctatattgaaaataatgacaatttaaaaacatgtacttatttcactgtatgtggacagtgtctatgattgcatcatgaagtgtcatataaccatgtacgtgtacatgagagagagatagagagagaagtggtagggtggtggtggtagaggggatggcgatagtaatcatggtaatggtagaggtgatggaggtggtaatgacggaggtaagggtggtagtgatgatggtggtggtggtaatggtggtggatgtggtggtggcaattgggatggtgggatggtggtagccatggtgatggtggtaatggtgttgatttaaagggtggtggtagtgaaggtgagggtagtggtggtggaggtggtggtgctggtagcaatagtgatggtggtgatggtgttgatgagggtgttgggatcagggtgagttcccacagtatatttcattcttgttgtaccactctgtcaacagcaccactgactgggacagaggaagaaggcacactctgaatgtgttattaacagaaacctcaaaacagtctgtctccttgtagtcattcaaaattatctttttcttacctggaaaactgaaactgaattaccgggaaaaacacaggagatttttgtttgttaatatgctgccaataaagtaattttatgtcaaatttaactacaggaaagggcaaggcattttctaagttccttagatgtcatgtggctaaaaaaaacaaaaggatggacagcagttagatactgtacacttagctgtttgaagccatatattcagaaagcagatgttgggagttggtgtttgaggactgatttcctggaggtattttatataggccaagttcattgttctaaactctaagggcttgacttgagggaggaaaagaggcaagaacatgtttagttttgctgacagcatcacatgggcagccctaaggctagacaactttagggcctgaagcttattctaggaaagaagcacctacagagtggcactgggctcccctccactatagagatgaagtcatatgacagtaaagggcaggcagggctgcctagggggcccagaactgacacttccattagaatgagcacaggccagggagagaagtggggaaccagagagaaggagctggaattcctttctctccatacataaatgcctgcagagtcccatttcagaatccggcagacaaagccaccaatgtgatccccatgaccttataaacattcattaaaatgcatttcaaggcatgtgatggcctccccaccccctagataatgagaaaacaaaggtttctcttctgatagagacaagttcagctctgaagtcaacattatttctggttctgtctgaacaatgacatatggcaactcttccctttctatagttctagtccagaatgacaaaaaaggggaaaaatttcttagagaaggtagagattatacgaatacagtccatgaaatgagcataaggagaataaagaatataacttatccaaagaagtctggcaggctgttataaatgcttgattttggacactgtagttggaggtttaacatggacaccaataaaaaggtcagcaaagggtatgcactgttcctattgggcaagaagataggaggtcaaaggtaaccaggaaagataaactcagggagacttattttccctccagagggcactgggcttgtaggccctgggcaaaattgtcaaaaaggtgaaaatcgcctgtggtttatttagtctgctctttcttcactagtgcctcaccagttcagttcaggccaatttgctagctaccacatttgtagaggttttacttgctttaaaaaacctcccacacctccccctgaacctgaaacataaaatgaatgcaattgttgttgttaacttgtttattgcagcttataatggttacaaataaagcaatagcatcacaaatttcacaaataaagcatttttttcactgcattctagttgtggtttgtccaaactcatcaatgtatcttatcatgtctgaagctttctaggtattgaataagaaaaatgaagttaaggtggttgatggtaacactatgctaataactgcagagccagaagcaccataagggacatgataagggagccagcagacctctgatctcttcctgaatgctaatcttaaacatcctgaggaagaatgggacttccatttggggtgggcctatgatagggtaataagacagtagtgaatatcaagctacaaaaagccccctttcaaattcttctcagtcctaacttttcatactaagcccagtccttccaaagcagactgtgaaagagtgatagttccgggagactagcactgcagattccgggtcactgtgagtgggggaggcagggaagaagggctcacaggacagtcaaaccatgccccctgtttttccttcttcaagtagacctctataagacaacagagacaactaaggctgagtggccaggcgaggagaaaccatctcgccgtaaaacatggaaggaacacttcaggggaaaggtggtatctctaagcaagagaactgagtggagtcaaggctgagagatgcaggataagcaaatgggtagtgaaaagacattcatgaggacagctaaaacaataagtaatgtaaaatacagcatagcaaaactttaacctccaaatcaagcctctacttgaatccttttctgagggatgaataaggcataggcatcaggggctgttgccaatgtgcattagctgtttgcagcctcaccttctttcatggagtttaagatatagtgtattttcccaaggtttgaactagctcttcatttctttatgttttaaatgcactgacctcccacattccctttttagtaaaatattcagaaataatttaaatacatcattgcaatgaaaataaatgttttttattaggcagaatccagatgctcaaggcccttcataatatcccccagtttagtagttggacttagggaacaaaggaacctttaatagaaattggacagcaagaaagcgagcttagtgatacttgtgggccagggcattagccacaccagccaccactttctgataggcagcctgcactggtggggtggcggccgccctaggattatggcactggtagaattcactacttatggcactggtagaattcactacttatggcactggtagaattcactacttatggcactggtagaattcactatcgttgtgcttgatctaaccatgtttcattgtgcttgatctaaccatgtttcattgtgcttgatctaaccatgtttcattgtgcttgatctaaccatgtatcgcccgggggcggccgcacacaaaaaaccaacacacagatctaatgaaaataaagatcttttattgaattcttagctggcctccacctttctcttcttcttggggctgtcgcctcccagctgagacaggtcgatccgtgtctcgtacaggccggtgatgctctggtggatcagggtggcgtccagcacctctttggtgctggtgtacctcttccggtcgatggtggtgtcaaagtacttgaaggcggcaggggctcccagattggtcagggtaaacaggtggatgatattctcggcctgctctctgatgggcttatcccggtgcttgttgtaggcggacagcactttgtccagattagcgtcggccaggatcactctcttggagaactcgctgatctgctcgatgatctcgtccaggtagtgcttgtgctgttccacaaacagctgtttctgctcattatcctcgggggagcccttcagcttctcatagtggctggccaggtacaggaagttcacatatttggagggcagggccagttcgtttcccttctgcagttcgccggcagaggccagcattctcttccggccgttttccagctcgaacagggagtacttaggcagcttgatgatcaggtcctttttcacttctttgtagcccttggcttccagaaagtcgatgggattcttctcgaagctgcttctttccatgatggtgatccccagcagctctttcacactcttcagtttcttggacttgcccttttccactttggccaccaccagcacagaataggccacggtggggctgtcgaagccgccgtacttcttagggtcccagtccttctttctggcgatcagcttatcgctgttcctcttgggcaggatagactctttgctgaagccgcctgtctgcacctcggtctttttcacgatattcacttggggcatgctcagcactttccgcacggtggcaaaatcccggcccttatcccacacgatctccccggtttcgccgtttgtctcgatcagaggccgcttccggatctcgccgttggccagggtaatctcggtcttgaaaaagttcatgatgttgctgtagaagaagtacttggcggtagccttgccgatttcctgctcgctcttggcgatcatcttccgcacgtcgtacaccttgtagtcgccgtacacgaactcgctttccagcttagggtactttttgatcagggcggttcccacgacggcgttcaggtaggcgtcgtgggcgtggtggtagttgttgatctcgcgcactttgtaaaactggaaatccttccggaaatcggacaccagcttggacttcagggtgatcactttcacttcccggatcagcttgtcattctcgtcgtacttagtgttcatccgggagtccaggatctgtgccacgtgctttgtgatctgccgggtttccaccagctgtctcttgatgaagccggccttatccagttcgctcaggccgcctctctcggccttggtcagattgtcgaactttctctgggtaatcagcttggcgttcagcagctgccgccagtagttcttcatcttcttcacgacctcttcggagggcacgttgtcgctcttgccccggttcttgtcgcttctggtcagcaccttgttgtcgatggagtcgtccttcagaaagctctgaggcacgatatggtccacatcgtagtcggacagccggttgatgtccagttcctggtccacgtacatatcccgcccattctgcaggtagtacaggtacagcttctcgttctgcagctgggtgttttccacggggtgttctttcaggatctggctgcccagctctttgatgccctcttcgatccgcttcattctctcgcggctgttcttctgtcccttctgggtggtctggttctctctggccatttcgatcacgatgttctcgggcttgtgccggcccatcactttcacgagctcgtccaccaccttcactgtctgcaggatgcccttcttaatggcggggctgccggccagattggcaatgtgctcgtgcaggctatcgccctggccggacacctgggctttctggatgtcctctttaaaggtcaggctgtcgtcgtggatcagctgcatgaagtttctgttggcgaagccgtcggacttcaggaaatccaggattgtcttgccggactgcttgtcccggatgccgttgatcagcttccggctcagcctgccccagccggtgtatctccgccgcttcagctgcttcatcactttgtcgtcgaacaggtgggcataggttttcagccgttcctcgatcatctctctgtcctcaaacagtgtcagggtcagcacgatatcttccagaatgtcctcgttttcctcattgtccaggaagtccttgtccttgataattttcagcagatcgtggtatgtgcccagggaggcgttgaaccgatcttccacgccggagatttccacggagtcgaagcactcgattttcttgaagtagtcctctttcagctgcttcacggtcactttccggttggtcttgaacagcaggtccacgatggcctttttctgctcgccgctcaggaaggcgggctttctcattccctcggtcacgtatttcactttggtcagctcgttatacacggtgaagtactcgtacagcaggctgtgcttgggcagcaccttctcgttgggcaggttcttatcgaagttggtcatccgctcgatgaagctctgggcggaagcgcccttgtccaccacttcctcgaagttccagggggtgatggtttcctcgctctttctggtcatccaggcgaatctgctgtttcccctggccagagggcccacgtagtaggggatgcggaaggtcaggatcttctcgatcttttcccggttgtccttcaggaatgggtaaaaatcttcctgccgccgcagaatggcgtgcagctctcccaggtggatctggtgggggatgctgccgttgtcgaaggtccgctgcttccgcagcaggtcctctctgttcagcttcacgagcagttcctcggtgccgtccatcttttccaggatgggcttgatgaacttgtagaactcttcctggctggctccgccgtcaatgtagccggcgtagccgttcttgctctggtcgaagaaaatctctttgtacttctcaggcagctgctgccgcacgagagctttcagcagggtcaggtcctggtggtgctcgtcgtatctcttgatcatagaggcgctcaggggggccttggtgatctcggtgttcactctcaggatgtcgctcagcaggatggcgtcggacaggttcttggcggccagaaacaggtcggcgtactggtcgccgatctgggccagcaggttgtccaggtcgtcgtcgtaggtgtccttgctcagctgcagtttggcatcctcggccaggtcgaagttgctcttgaagttgggggtcaggcccaggctcagggcaatcaggttgccgaacaggccattcttcttctcgccgggcagctgggcgatcagattttccagccgtctgctcttgctcagtctggcagacaggatggccttggcgtccacgccgctggcgttgatggggttttcctcgaacagctggttgtaggtctgcaccagctggatgaacagcttgtccacgtcgctgttgtcggggttcaggtcgccctcgatcaggaagtggccccggaacttgatcatgtgggccagggccagatagatcagccgcaggtcggccttgtcggtgctgtccaccagtttctttctcaggtggtagatggtggggtacttctcgtggtaggccacctcgtccacgatgttgccgaagatggggtgccgctcgtgcttcttatcctcttccaccaggaaggactcttccagtctgtggaagaagctgtcgtccaccttggccatctcgttgctgaagatctcttgcagatagcagatccggttcttccgtctggtgtatcttcttctggcggttctcttcagccgggtggcctcggctgtttcgccgctgtcgaacagcagggctccgatcaggttcttcttgatgctgtgccggtcggtgttgcccagcaccttgaatttcttgctgggcaccttgtactcgtcggtgatcacggcccagcccacagagttggtgccgatgtccaggccgatgctgtacttcttgtcggacgcttcgaccttgcgctttttcttcggcgaagcgtaatctggaacatcgtatgggtacatggtggccctaggatcgattactagctcacgacacctgaaatggaagaaaaaaactttgaaccactgtctgaggcttgagaatgaaccaagatccaaactcaaaaagggcaaattccaaggagaattacatcaagtgccaagctggcctaacttcagtctccacccactcagtgtggggaaactccatcgcataaaacccctccccccaacctaaagacgacgtactccaaaagctcgagaactaatcgaggtgcctggacggcgcccggtactccgtggagtcacatgaagcgacggctgaggacggaaaggcccttttcctttgtgtgggtgactcacccgcccgctctcccgagcgccgcgtcctccattttgagctccctgcagcagggccgggaagcggccatctttccgctcacgcaactggtgccgaccgggccagccttgccgcccagggcggggcgatacacggcggcgcgaggccaggcaccagagcaggccggcgagcttgagactacccccgtccgattctcggtggccgcgctcgcaggccccgcctcgccgaacatgtgcgctgggacgcacgggccccgtcgccgcccgcggccccaaaaaccgaaataccagtgtgcagatcttggcccgcatttacaagactatcttgccagaaaaaaagcgtcgcagcaggtcatcaaaaattttaaatggctagagacttatcgaaagcagcgagacaggcgcgaaggtgccaccagattcgcacgcggcggccccagcgcccaggccaggcctcaactcaagcacgaggcgaaggggctccttaagcgcaaggcctcgaactctcccacccacttccaacccgaagctcgggatcaagaatcacgtactgcagccaggggcgtggaagtaattcaaggcacgcaagggccataacccgtaaagaggccaggcccgcgggaaccacacacggcacttacctgtgttctggcggcaaacccgttgcgaaaaagaacgttcacggcgactactgcacttatatacggttctcccccaccctcgggaaaaaggcggagccagtacacgacatcactttcccagtttaccccgcgccaccttctctaggcaccggttcaattgccgacccctccccccaacttctcggggactgtgggcgatgtgcgctctgcccactgacgggcaccggagcctcacgcatgctcttctccacctcagtgatgacgagagcgggcgggtgagggggcgggaacgcagcgatctctgggttctacgttagtgggagtttaacgacggtccctgggattccccaaggcaggggcgagtccttttgtatgaattactcaaatcgattaggatccggcgcgcccaccgcggaaaaaaagcaccgactcggtgccactttttcaagttgataacggactagccttattttaacttgctatttctagctctaaaacgtgataaaagcaactgttagcggtgtttcgtcctttccacaagatatataaagccaagaaatcgaaatactttcaagttacgataagcatatgatagtccattttaaaacataattttaaaactgcaaactacccaagaaattattactttctacgtcacgtattttgtactaatatctttgtgtttacagtcaaattaattccaattatctctctaacagccttgtatcgtatatgcaaatatgaaggaatcatgggaaataggccctcggcgcgcccaccgcggaaaaaaagcaccgactcggtgccactttttcaagttgataacggactagccttattttaacttgctatttctagctctaaaactgaccaatagccttgacaagcggtgtttcgtcctttccacaagatatataaagccaagaaatcgaaatactttcaagttacggtaagcatatgatagtccattttaaaacataattttaaaactgcaaactacccaagaaattattactttctacgtcacgtattttgtactaatatctttgtgtttacagtcaaattaattctaattatctctctaacagccttgtatcgtatatgcaaatatgaaggaatcatgggaaataggccctcggatccttaattgctagcgaggcctgtactctgttttcacaggaagaaatcctcacccagtcttccccaaacacattcccaggttctgtcattagtgggatagagatgattactgtggggagaagagaaacatctggatggatttggtgaggttgatctatagaggaagtaggtgctgcctgaggtagctgtaatagaagctaaaggtcaaaggagagggccctgtcccaatccagatgactccacttctgctggacccaggttcacaagcttaatctacatttcacctaaatttggctaacaagcccaaaatcacacaggcaaagggagaagtggaggcagaaccgaggttggaggccaccagggccaccgggcagagatcatttaagcccaaccttctcacttctccctgggctctgcctctcttaaaggaccttgtggtgtgacctcttgtaggtccctttcacactcggggcctcagtttccccactgtaaagtgaatgggtcccagctttggtaagcttatgcttacctgatgctttcttcctgggctgctcttgtagagaaaagataaatcttcttcctccatccacgagggcttctttccctgggggtgagagtaggctgaggagagccacttgcacacactcttaaagaaagtattacctgcaccagctcagtgagaggcacagatcagactgttacttgaatcaaattatgagcctccccaaatatatctatgacatttaaataggggattacttgaacatagactttgggatccggtgtggagtgcaggagactagcaaagtgaatcctgagagtagcaggtctgcacctgttggatcgagaaaggcggcctacaattctggtcaaatgagctgtgcttattgacatattctattagagagtactaccaggtcaccagtcaccagaaaggctgccagctctccaaccacctccagggaactatcctgaatggggccttaacaagcctaagagagggttggtttgggtcccaagccaatatttgctctgctttatgtcagtcatatggaacccaaaccaaccctctcctatgtgcctcaccagtcggtgcagggatcccaatttcaagtttggttttttatggtcaaagtccagcatagattaaatgaaggggtgtgatgatggtgttaaaagagaactccagaccagtttaactcttggacacacatcccatctcaccatggtgcttccaaccttccagagatgatgggctcctattttctgatgacaaagccctccacaggattgctgcctggccatcagggagtgcctctgtaactgaggctgagatcccactttcagtcctccagctgtggcccatccctgctccgcccaccgggtatggcctgtcctaggctcttaggtatggctgcattgtgaaatgatggctacagagctggcatctcctgtagtctggttcatctagtgcactacctcatagttaaaagaaatctgtttaagccactgagggtggctcctagtgccaactccaagaacaggaagcttcccttttttgggaggaggggcagatggtaacatggatcgtccaggtcaatgggagcagggcaaccacagtaagtactggacaacaacacaaaactccatgtgtggcttccatcgagtccctctccaattggtttggtcttctccgtcccatgcagcactttagcaaggggcctggctgaaggctatgaattgtgtggagcctcctcattgcagtctccaaccatctgatgctgggaaaatgtcaccaggatgcagccatgccgtgtggccaatgaaccgagaaaacaccccttttctagaatgctctaaagaggcagaataatccagaggtgaggaaggaaatactccaccagagacccaggcagttcctacaaaagccagactttccttcacctagggagtgacaagaccagtggaaaacactctcaagcagtaacccccaaatgctctgcaagccagtggcgtccagataccgcacaagcgagtgggctgtctaatcccatcatcatgatgtaaatatctctaggctgccccgggctgtgcctgaccctgtcttcagctttccacacctccacctacagcccatgcacagaaggaccacccaggaatgctgcaagtgtggcacctccagggccacccagggagaaggagggcagctatgctggtggctccaggcccatttggcgggtggtaccttcacaccacaaagcccaaactgaggccccagatttggctgatgagggcatattggacaggggtcacttatgctcttccccattgccacctggcctctggctacctggacttggctacctgtggatcctctcacaggtgccaccatcttggctgagtctccagatgcgaggtccctgaggcagtggcaggcttctcgctaatgctgatgggattaggaatgggataggtggggagggccctggactgggccctgatgagccaagtgggtttttagaggggctactggtacatttcagggacaggacatctggtagagctaagctggggcaataaggagccactgctaatctgagagctagaaacaatcagcttctgggtcattattaattagggtagtttgggctgtgtggaagtcacgtactatatggggtagccacagctctctctacagataatctctaagacttctgattgggaccgtgtgaatgcagtagcaatatctcttcttactgccaggccctgccagtcctgcctccacgccctggctggccccccttatgatctgacccatgccaggctgccatagtatgttacttctgcattagcactccttgggacctgcctctccactgtccctcagactttaaagaactatacaaacccaaggggctcttcccaagagaattgatatgacttgaggtgattccatttctggaagtagtcactccattttctgcctcactctttcagtgcttcacagagcaggttcgattaagcacacagattaattaagcacacagattaatcgtaactataacggtcctaaggtagcgaaagcttgcatgcctgcaggtcgactctagaggatcaaacctagccaccgcggtggcggccggctagccggctagccggctagccctagaactagtaacggccgccagtgtgctggaattcggcttgtaaggtaccggtgaagttcctatactttctagagaataggaacttcggaataggaacttctacctagatgcatgctcgagcggcccctacagttgaagtcggaagtttacatacacttaagttggagtcattaaaactcgtttttcaactactccacaaatttcttgttaacaaacaatagttttggcaagtcagttaggacatctactttgtgcatgacacaagtcatttttccaacaattgtttacagacagattatttcacttataattcactgtatcacaattccagtgggtcagaagtttacatacactaagttgactgtgcctttaaacagcttggaaaattccagaaaatgatgtcatggctttagaagcttctgatagactaattgacatcatttgagtcaattggaggtgtacctgtggatgtatttcaaggaattctgtggaatgtgtgtcagttagggtgtggaaagtccccaggctccccagcaggcagaagtatgcaaagcatgcatatcgatactagtttataagatctcgagctagggtaccgtcaaggctgcagtgagacatgatcttgccactgcactccagcctggacagcagagtgaaaccttgcctcacgaaacagaatacaaaaacaaacaaacaaaaaactgctccgcaatgcgcttccttgatgctctaccacataggtctgggtactttgtacacattatctcattgctgttcataattgttagattaattttgtaatattgatattattcctagaaagctgaggcctcaagatgataacttttattttctggacttgtaatagctttctcttgtattcaccatgttgtaactttcttagagtagtaacaatataaagttattgtgagtttttgcaaacacagcaaacacaacgacccatatagacattgatgtgaaattgtctattgtcaatttatgggaaaacaagtatgtactttttctactaagccattgaaacaggaataacagaacaagattgaaagaatacattttccgaaattacttgagtattatacaaagacaagcacgtggacctgggaggagggttattgtccatgactggtgtgtggagacaaatgcaggtttataatagatgggatggcatctagcgcaatgactttgccatcacttttagagagctcttggggaccccagtacacaagaggggacgcagggtatatgtagacatctcattctttttcttagtgtgagaataagaatagccatgacctgagtttatagacaatgagcccttttctctctcccactcagcagctatgagatggcttgccctgcctctctactaggctgactcactccaaggcccagcaatgggcagggctctgtcagggctttgatagcactatctgcagagccagggccgagaaggggtggactccagagactctccctcccattcccgagcagggtttgcttatttatgcatttaaatgatatatttattttaaaagaaataacaggagactgcccagccctggctgtgacatggaaactatgtagaatattttgggttccatttttttttccttctttcagttagaggaaaaggggctcaggatccacttgcccagtgttcttccttagttcctaccttcgaccttgatcctcctttatcttcctgaaccctgctgagatgatctatgtggggagaatggcttctttgagaaacatcttcttcgttagtggcctgcccctcattcccactttaatatccagaatcactataagaagaatataataagaggaataactcttattataggtaagggaaaattaagaggcatacgtgatgggatgagtaagagaggagagggaaggattaatggacgataaaatctactactatttgttgagaccttttatagtctaatcaattttgctattgttttccatcctcacgctaactccataaaaaaacactattattatctttattttgccatgacaagactgagctcagaagagtcaagcatttgcctaaggtcggacatgtcagaggcagtgccagacctatgtgagactctgcagctactgctcatgggccctgtgctgcactgatgaggaggatcagatggatggggcaatgaagcaaaggaatcattctgtggataaaggagacagccatgaagaagtctatgactgtaaatttgggagcaggagtctctaaggacttggatttcaaggaattttgactcagcaaacacaagaccctcacggtgactttgcgagctggtgtgccagatgtgtctatcagaggttccagggagggtggggtggggtcagggctggccaccagctatcagggcccagatgggttataggctggcaggctcagataggtggttaggtcaggttggtggtgctgggtggagtccatgactcccaggagccaggagagatagaccatgagtagagggcagacatgggaaaggtgggggaggcacagcatagcagcatttttcattctactactacatgggactgctcccctatacccccagctaggggcaagtgccttgactcctatgttttcaggatcatcatctataaagtaagagtaataattgtgtctatctcatagggttattatgaggatcaaaggagatgcacactctctggaccagtggcctaacagttcaggacagagctatgggcttcctatgtatgggtcagtggtctcaatgtagcaggcaagttccagaagatagcatcaaccactgttagagatatactgccagtctcagagcctgatgttaatttagcaatgggctgggaccctcctccagtagaaccttctaaccagctgctgcagtcaaagtcgaatgcagctggttagactttttttaatgaaagcttgcatgcagcactttgggaggctgaggtgggtggactgcttggagctcaggagttcaagaccatcttggacaacatggtgataccctgcctctacaaaaagtacaaaaattagcctggcatggtggtgtgcacctgtaatcccagctattagggtggctgaggcaggagaattgcttgaacccgggaggcggaggttgcagtgagctgagatcgtgccactgcactccagcctgggggacagagcacattataattaactgttattttttacttggactcttgtggggaataagatacatgttttattcttatttatgattcaagcactgaaaatagtgtttagcatccagcaggtgcttcaaaaccatttgctgaatgattactatactttttacaagctcagctccctctatcccttccagcatcctcatctctgattaaataagcttcagtttttccttagttcctgttacatttctgtgtgtctccattagtgacctcccatagtccaagcatgagcagttctggccaggcccctgtcggggtcagtgccccacccccgccttctggttctgtgtaaccttctaagcaaaccttctggctcaagcacagcaatgctgagtcatgatgagtcatgctgaggcttagggtgtgtgcccagatgttctcagcctagagtgatgactcctatctgggtccccagcaggatgcttacagggcagatggcaaaaaaaaggagaagctgaccacctgactaaaactccacctcaaacggcatcataaagaaaatggatgcctgagacagaatgtgacatattctagaatatattatttcctgaatatatatatatatatacacatataccatatgaaacacctctaggctataaggcaacagagctccttttttttttttctgtgctttcctggctgtccaaatctctaatgataagcatacttctattcaatgagaatattctgtaagattatagttaagaattgtgggagccattccgtctcttatagttaaatttgagcttcttttatgatcactgtttttttaatatgctttaagttctggggtacatgtgccatggtggtttgctgcacccatcaacccgtcatctacattaggtatttctcctaatgctatccttcccctagccccccacccccaacaggccccagtgtgtgatgttcccctccctgtgtccatggatcactggtttttttttgttttttttttttttttaaagtctcagttaaatttttggaatgtaatttattttcctggtatcctaaggacttgcaagttatctggtcactttagccctcacgttttgatgataatcacatatttgtaaacacaacacacacacacacacacacacacatatatatatatataaaacatatatatacataaacacacataacatatttatcgggcatttctgagcaactaatcatgcaggactctcaaacactaacctatagccttttctatgtatctacttgtgtagaaaccaagcgtggggactgagaaggcaatagcaggagcattctgactctcactgcctttagctaggcccctccctcatcacagctcagcatagtcctgagctcttatctatatccacacacagtttctgacgctgcccagctatcaccatcccaagtctaaagaaaaaaataatgggtttgcccatctctgttgattagaaaacaaaacaaaataaaataagcccctaagctcccagaaaacatgactaaaccagcaagaagaagaaaatacaataggtatatgaggagactggtgacactaagtgtctgaatgaggcttgagtacagaaaagaggctctagcagcatagtggtttagaggagatgtttctttccttcacagatgccttagcctcaataagcttgcggttgtggaagtttacttgtttatcaccggtgacgtccatgagcaaattaagaaaaacaacaacaaatgaatgcatatatatgtatatgtatgtgtgtatatatacacatatatatatatattttttttcttttcttaccagaaggttttaatccaaataaggagaagatatgcttagaactgaggtagagttttcatccattctgtcctgtaagtattttgcatattctggagacgcaggaagagatccatctacatatcccaaagctgaattatggtagacaaaactcttccacttttagtgcatcaatttcttatttgtgtaataagaaaattgggaaaacgatcttcaatatgcttaccaagctgtgattccaaatattacgtaaatacacttgcaaaggaggatgtttttagtagcaatttgtactgatggtatggggccaagagatatatcttagagggagggctgagggtttgaagtccaactcctaagccagtgccagaagagccaaggacaggtacggctgtcatcacttagacctcaccctgtggagccacaccctagggttggccaatctactcccaggagcagggagggcaggagccagggctgggcataaaagtcagggcagagccatctattgcttacatttgcttctgacacaactgtgttcactagcaacctcaaacagacaccatgggtcatttcacagaggaggacaaggctactatcacaagcctgtggggcaaggtgaatgtggaagatgctggaggagaaaccctgggaaggtaggctctggtgaccaggacaagggagggaaggaaggaccctgtgcctggcaaaagtccaggtcgcttctcaggatttgtggcaccttctgactgtcaaactgttcttgtcaatctcacaggctcctggttgtctacccatggacccagaggttctttgacagctttggcaacctgtcctctgcctctgccatcatgggcaaccccaaagtcaaggcacatggcaagaaggtgctgacttccttgggagatgccataaagcacctggatgatctcaagggcacctttgcccagctgagtgaactgcactgtgacaagctgcatgtggatcctgagaacttcaaggtgagtccaggagatgtttcagccctgttgcctttagtctcgaggcaacttagacaactgagtattgatctgagcacagcagggtgtgagctgtttgaagatactggggttgggggtgaagaaactgcagaggactaactgggctgagacccagtggtaatgttttagggcctaaggagcgcctctaaaaatctagatggacaattttgactttgagaaaagagaggtggaaatgaggaaaatgacttttattagattccagtagaaagaactttcatctttccctcatttttgttcgttttaaaacatctatctggaggcaggacaagtatggtcgttaaaaagatgcaggcagaaggcatatattggctcagtcaaagtggggaactttggtggccaaacatacattgctaaggctattcctatatcagctggacacatataaaatgctgctaatgcttcattacaaacttatatcctttaattccagatgggggcaaagtatgtccaggggtgaggaacaattgaaacatttgggctggagtagattttgaaagtcagctctgtgtgtgtgtgtgtgtgcgcgcgcgcgtgtgtgtgtgtgtgtgtcaacgtgtgtttcttttaacgtcttcagcctacaacatacagggttcatggtggcaagaagatagcaagatttaaattatggccagtgactagtgcttgaaggggaacaactacctgcatttaatgggaaggcaaaatctcaggctttgagggaagttaacataggcttgattctgggtagaagctgggtgtgtagttatctggaggccaggctggagctctcagctcactatgggttcatctttattgtctcctttcatctcaacagctcctgggaaatgtgctggtgaccgttttggcaatccatttcggcaaagaattcacccctgaggtgcaggcttcctggcagaagatggtgactgcagtggccagtgccctgtcctccagataccactgagcctcttgcccatgattcagagctttcaaggataggctttattctgcaagcaattcaaataataaatctattctgctgagagatcacacatgattttcttcagctcttttttttacatctttttaaatatatgagccacaaagggtttatattgagggaagtgtgtatgtgtatttctgcatgcctgtttgtgtttgtggtgtgtgcatgctcctcatttatttttatatgagatgtgcattttgttgagcaaataaaagcagtaaagacacttgtacacgggagttctgcaagtgggagtaaatggtgtaggagaaatccggtgggaagaaagacctctataggacaggacttctcagaaacagatgttttggaagagatgggaaaaggttcagtgaagacctgggggctggattgattgcagctgagtagcaaggatggttcttaatgaagggaaagtgttccaagctttaggaattcaaggtttagtcaggtgtagcaattctattttattaggaggaatactatttctaatggcacttagcttttcacagcccttgtggatgcctaagaaagtgaaattaatcccatgccctcaagtgtgcagattggtcacagcatttcaagggagagacctcattgtaagactctgggggaggtggggacttaggtgtaagaaatgaatcagcagaggctcacaagtcagcatgagcatgttatgtctgagaaacagaccagcactgtgagatcaaaatgtagtgggaagaatttgtacaacattaattggaaggcttacttaatggaatttttgtatagttggatgttagtgcatctctataagtaagagtttaatatgatggtgttacggacctaatgtttgtgtctcctcaaaattcacatgctgaatccccaactcccaactgaccttatctgtgggggaggcttttgaaaagtaattaggtttagatgagctcataagagcagatccccatcataaaattattttccttatcagaagcagagagacaagccatttctctttcctcccggtgaggacacagtgagaagtccgccatctgcaatccaggaagagaaccctgaccacgagtcagccttcagaaatgtgagaaaaaactctgttgttgaagccacccagtcttttgtattttgttatagcaccttgcactgagtaaggcagatgaagaaggagaaaaaaataagcttatcgaaacgcgtccccatcctcactgactccgtcctggagttggatgagagataatggccttacgttgtgccaggggagggtcgggctggatttagcaagatttaccttctccaaagagcggtgctgcagtggcacagctgcccacggaggtgggggggtcaccgtccctggaggtgatgaagaactgtggggatgtggcactgagggacatggccagtgggcacggtgggtgggttggggttggtcttggggatcttggagggcttttccagccttcatgatttgacgattgtatgaacatctacatggcaattctccagctgcctgtcccagtcctactgacccagctgtatctctccaggcaagctcttccaccccttctgcttgcatccagacaccatcaaacatgcaggctcagacacagggaccagcagtgtctgtggcctttttgtgctcctctccatgctgggttttaacttgctctttgtccttctatcctatcttcttatccttaaggctgttctgaacgctgtgacttggagagtgtcccagagccctcaacacctgcatgtcccacgtccatgctgtcctgcacttccttatccccaagatctgcctctccgtgatgcactgaattggcaaacatgtgtcaccccagaccaacaatgtcacagcaaactcccccttgataggacaagggggaatggctttacactgagacaggggaggtttgggttggatatgaggaggcagtttttcccccagagggtggtgacgcactgaacaggttgcccaaggaggctgtggatgccccatccctgcaggcattcaaggccaggctggatgtggctctgggcagcctgggctgctggttgatgaccctgcacatagcagggggttggatctggatgagcactgtgctcctttgcaacccaggccgttctatgattctgtcattctaaatctctctttcagcctaaagctttttccccgtatccccccaggtgtctgcaggctcaaagagcagcgagaagcgttcagaggaaagcgatcccgtgccaccttccccgtgcccgggctgtccccgcacgctgccggctcggggatgcggggggagcgccggaccggagcggagccccgggcggctcgctgctgccccctagcgggggagggacgtaattacatccctgggggctttgggggggggctgtccctatcgattactagtttagccatagagcccaccgcatccccagcatgcctgctattgtcttcccaatcctcccccttgctgtcctgccccaccccaccccccagaatagaatgacacctactcagacaatgcgatgcaatttcctcattttattaggaaaggacagtgggagtggcaccttccagggtcaaggaaggcacgggggaggggcaaacaacagatggctggcaactagaaggcacagtcgctcgaagagcggccgctcgctttacttgtacagctcgtccatgccgagagtgatcccggcggcggtcacgaactccagcaggaccatgtgatcgcgcttctcgttggggtctttgctcagggcggactgggtgctcaggtagtggttgtcgggcagcagcacggggccgtcgccgatgggggtgttctgctggtagtggtcggcgagctgcacgctgccgtcctcgatgttgtggcggatcttgaagttcaccttgatgccgttcttctgcttgtcggccatgatatagacgttgtggctgttgtagttgtactccagcttgtgccccaggatgttgccgtcctccttgaagtcgatgcccttcagctcgatgcggttcaccagggtgtcgccctcgaacttcacctcggcgcgggtcttgtagttgccgtcgtccttgaagaagatggtgcgctcctggacgtagccttcgggcatggcggacttgaagaagtcgtgctgcttcatgtggtcggggtagcggctgaagcactgcacgccgtaggtcagggtggtcacgagggtgggccagggcacgggcagcttgccggtggtgcagatgaacttcagggtcagcttgccgtaggtggcatcgccctcgccctcgccggacacgctgaacttgtggccgtttacgtcgccgtccagctcgaccaggatgggcaccaccccggtgaacagctcctcgcccttgctcaccatgggccctgggttggactccacgtctcccgccaacttgagaaggtcaaaattcaaagtctgtttcacctcgaggtttcggccagcaggcggggagcccgaggtagctcccgctcccttgagccaggcccctgccagacctgagctccctcccaagcctggcttccccaaccggtggccttcatgggccagaagccattccttcacggctagccctccggagtagttgcccacggctccgctgctgcagaccactctgtggcacgggatgaggatcttgacaggattgcctctcatggcgcctcccactgctcgcgcggctttggggttgccggccagggcggccaattgctggtaagaaatcacttctccgaatttcacaaccttaagcagcttccataacacctgacgcgtgaacgactcttgctggaaaacgggatggtgaagcgctggcacggggaactcttcgatagcctcgggctggtggaaataggcattcagccaggctgtgcactgcatcaggggctccggacctccgagaaccgcagcgggggctgggacctccacggcatcagctgcagacgtccccttgcccaggagctttatttcgtgcagaccctgctcacaaccagacagctccagcttccccaaagggctgtccagtgtggtgcgtttcatttcacaatccttgtccatggtggccctaggccctggggagagaggtcggtgattcggtcaacgagggagccgactgccgacgtgcgctccggaggcttgcagaatgcggaacaccgcgcgggcaggaacagggcccacactaccgccccacaccccgcctcccgcaccgccccttcccggccgctgctctcggcgcgccccgctgagcagccgctattggccacagcccatcgcggtcggcgcgctgccattgctccctggcgctgtccgtctgcgagggtactagtgagacgtgcggcttccgtttgtcacgtccggcacgccgcgaaccgcaaggaaccttcccgacttaggggcggagcaggaagcgtcgccggggggcccacaagggtagcggcgaagatccgggtgacgctgcgaacggacgtgaagaatgtgcgagacccagggtcggcgccgctgcgtttcccggaaccacgcccagagcagccgcgtccctgcgcaaacccagggctgccttggaaaaggcgcaaccccaaccccgtggaaataaatcgataactagtgatatcatcatgtctggatcccatcacaaagctctgacctcaatcctatagaaaggaggaatgagccaaaattcacccaacttattgtgggaagcttgtggaaggctactcgaaatgtttgacccaagttaaacaatttaaaggcaatgctaccaaatactaattgagtgtatgttaacttctgacccactgggaatgtgatgaaagaaataaaagctgaaatgaatcattctctctactattattctgatatttcacattcttaaaataaagtggtgatcctaactgaccttaagacagggaatctttactcggattaaatgtcaggaattgtgaaaaaagtgagtttaaatgtatttggctaaggtgtatgtaaacttccgacttcaactgtaggggatcctctagggccgccagtgtgatggatatctgcagaattcggcttcaggtaccgtcgacgatgtaggtcacggtctcgaagccgcggtgcgggtgccagggcgtgcccttgggctccccgggcgcgtactccacctcacccatctggtccatcatgatgaacgggtcgaggtggcggtagttgatcccggcgaacgcgcggcgcaccgggaagccctcgccctcgaaaccgctgggcgcggtggtcacggtgagcacgggacgtgcgacggcgtcggcgggtgcggatacgcggggcagcgtcagcgggttctcgacggtcacggcgggcatgtcgacaagccgaattccagcacactggcggccgttactaggtagctagctcgagccttcgaagatctcctagggaagttcctatactttctagagaataggaacttcggaataggaacttcaccggtgggtgaaaagccgaattctgcagatatcaagcttatcgataccgtcgacctcgagggggggcccggttagatccccgggtaccgagctcgaatatctatgtcgggtgcggagaaagaggtaatgaaatggattaagtggcaggattaattaagtggcaggattaatcttcgaacgaaggagccatccaactaaccgtcatgttcgggcaaccgaagaagggagtggcaggatttcctttggagacttctggaattagacagcagtttaatgcaagcatctaaattctcttcctcccagagtctcattaaaactacagtaagagtttgtgttttgttttgtttttaaagacaaaatcccaccaggatagagagaataggagaggagataacagcatcataatttatgaaactaaaatgcagatagaccaggattaactgactacacagcaccaaggaagctgaatcacaagacagcagaggagaaaactggaaaggatcgtggtctatacggcagaatcttcccaagcctcaggaggaggagctctagatgcttatgatggcaactaaagcctaaaagctaattcattttaaagttcttccaaatgcatagggttttatttttccagacctgggttcagatggggaatttgacaaacaatggaaagggggaaaaacaacaatctaaacactgagtgacaaagtaacaaagaaatagtctagctatcagccagtcaagccagccttggctttgctatccaaagtagtcagtctaattctaccaccagtttctgttcctgtagctgtctactgcctgccagggactctgccttcccacccacaactaccaatggaaggatgtggtgaccataccagtggctgctgacatctcctgccatgggaagcataattgcctccagcagcctcccccttagatccatcatttttgttgcacttggcctgggctgtactcccggccaatgactgaacatggtgagcatagtaatgcaggcccatttctgtgaggagcaggactcctccagtaggtgactttggctcaaggactctctattggcctggttgaacttttcctgaactgtgctactgtctgagactcttcttacccaatcctctttctcgccccaattgtcacagaccacctgcattgtggtctgagtctctccccaccttctcttgctcttccctgtttatctttcacaggcatttcccccagtacattccttgaatgtctaacccgatacgggtgcctgacttttggcagacctaagcagacaaaaaggagtacttggttacctagctcttctttctaccacaaacatcgagggaaccctttttccctcacccctctgccacacccccactgccccagtgaacaaccacagagagagctgtggtataatattaggctggtgcaaaagtaattgcggtttttgccattacttttaatggtaaaaaccgcaattacttttgcacctacctagtatttgtgtccccccaaattcatatgttgaaacctaacccacaatatgatgtcattaggaggcaagaccttgaggaggtgattagatgatggggtggagctctcctgaatgagattagtgcccttataagaagaagcccaaggaagctaccttgactcttccatcacatgagaatgcagcaagaaggcaccatctactaatcaggaagagagctctcaccagacactgaatctgccagtgtcttgatcttgaagttcccagcctccagaactatgcataatgcatttccattgtctctaagccacccagcctatggtattttgtcatagcagcctgaactgactaagacagtgagccacatgagaagtgccccaacccctcccttaagcacttggctcacagatcagtgggttcatttctgcctgagttttattgttattctgtagatttcttgggctagatatatttttctgttattttccttcttcacctcagtcatgaattggttgttttaaaaaagacaatgtaagtcatggggaaactcctgacaactctactctcctagggttcctgataaaaggggattcagttgagtcctctgatggtctctacctgccaaagtccagcagcccttagcaaacatgctgctcgtttctgtagagaaggtgctggtgtcccaccatacttctctctccctcatgaagggcttgcgacccagcaaatgggtggcttatatgggtctgtttcaaaggaagagccagctctgggaagaaaaacgatgagcataagcataacctaccactgtgcctgggaaagcagacaacttttttgatgtgtgaatatctaatgagaatggaatccatcaattaccttaaacttaggcacagtcttcaaattcaatatatgtgggatatacttttagtcagtttgtagacgttatttgtaataaataatctggcttctctaaagaaattattttaagtgtttggtttggtttgatttaatggtaaaattatatttagtggcagagaattatagcaatggtgataaactatagagtgtcataagttcatatcttattctcacatttgaagctgcctgcagatgcattcaagatgcagccagaagtcaggagactcaggctgttatttggagctcatcattttacagccttgctggactcccactttctcaggggaaaaatgtggtgttgacccagattagctctccaggccctgctgagttgggcactctgtaagctggagggtcttctattgtcttcacctaagtgtcaatcaacaacccaaatgggcatgggggaagagggagctgggccaatgcccagggtgcctggtagagagataccttgggcactggaaggcaccagcttcccagagagaagggggagggccatgaaaaagttggctgtagatgccagggacactgggactctccagctgtgtgtttgtgtcttctgaagacttatgtttcattcctttggagcatgcataatcatacactgtgggatgtgttatatagattgcttgatagttcaccactgtaataaaatactgtgactggaatctgctcccagtctgcctttgatagcacttgtgcaacacacatttactgagcatttacagtgatccaggacctgtgttgtgaaaacattgatggacaaggcagatggtggagcacgtcagtgaggatttttaacaaaggctggtaagtgctataaaggaacattgtaggacactagagaacaaagaacaggagaacctgacttaggctggggtggggcgttggttagaggaggctccttggaggacatgaggtttaagctgtgacctgaggatgaatagatgttggccaggtgaggttaatctggggctcaagatcgagcattaagcttgtcagccttaccagtaaaaaagaaaacctattaaaaaaacaccactcgacacggcaccagctcaatcagtcacagtgtaaaaaagggccaagtgcagagcgagtatatataggactaaaaaatgacgtaacggttaaagtccacaaaaaacacccagaaaaccgcacgcgaacctacgcccagaaacgaaagccaaaaaacccacaacttcctcaaatcgtcacttccgttttcccacgttacgtaacttcccattttaagaaaactacaattcccaacacatacaagttactccgccctaaaacctacgtcacccgccccgttcccacgccccgcgccacgtcacaaactccaccccctcattatcatattggcttcaatccaaaataaggtatattattgatgatgtttaaactacggcccggtacccagcttttgttccctttagtgagggttaattgcgcgcttggcgtaatcatggtcatagctgtttcctgtgtgaaattgttatccgctcacaattccacacaacatacgagccggaagcataaagtgtaaagcctggggtgcctaatgagtgagctaactcacattaattgcgttgcgctcactgcccgctttccagtcgggaaacctgtcgtgccagctgcattaatgaatcggccaacgcgcggggagaggcggtttgcgtattgggcgctcttccgcttcctcgctcactgactcgctgcgctcggtcgttcggctgcggcgagcggtatcagctcactcaaaggcggtaatacggttatccacagaatcaggggataacgcaggaaagaacatgtgagcaaaaggccagcaaaaggccaggaaccgtaaaaaggccgcgttgctggcgtttttccataggctccgcccccctgacgagcatcacaaaaatcgacgctcaagtcagaggtggcgaaacccgacaggactataaagataccaggcgtttccccctggaagctccctcgtgcgctctcctgttccgaccctgccgcttaccggatacctgtccgcctttctcccttcgggaagcgtggcgctttctcatagctcacgctgtaggtatctcagttcggtgtaggtcgttcgctccaagctgggctgtgtgcacgaaccccccgttcagcccgaccgctgcgccttatccggtaactatcgtcttgagtccaacccggtaagacacgacttatcgccactggcagcagccactggtaacaggattagcagagcgaggtatgtaggcggtgctacagagttcttgaagtggtggcctaactacggctacactagaaggacagtatttggtatctgcgctctgctgaagccagttaccttcggaaaaagagttggtagctcttgatccggcaaacaaaccaccgctggtagcggtggtttttttgtttgcaagcagcagattacgcgcagaaaaaaaggatctcaagaagatcctttgatcttttctacggggtctgacgctcagtggaacgaaaactcacgttaagggattttggtcatgagattatcaaaaaggatcttcacctagatccttttaaattaaaaatgaagttttaaatcaatctaaagtatatatgagtaaacttggtctgacagttaccaatgcttaatcagtgaggcacctatctcagcgatctgtctatttcgttcatccatagttgcctgactccccgtcgtgtagataactacgatacgggagggcttaccatctggccccagtgctgcaatgataccgcgagacccacgctcaccggctccagatttatcagcaataaaccagccagccggaagggccgagcgcagaagtggtcctgcaactttatccgcctccatccagtctattaattgttgccgggaagctagagtaagtagttcgccagttaatagtttgcgcaacgttgttgccattgctacaggcatcgtggtgtcacgctcgtcgtttggtatggcttcattcagctccggttcccaacgatcaaggcgagttacatgatcccccatgttgtgcaaaaaagcggttagctccttcggtcctccgatcgttgtcagaagtaagttggccgcagtgttatcactcatggttatggcagcactgcataattctcttactgtcatgccatccgtaagatgcttttctgtgactggtgagtactcaaccaagtcattctgagaatagtgtatgcggcgaccgagttgctcttgcccggcgtcaatacgggataataccgcgccacatagcagaactttaaaagtgctcatcattggaaaacgttcttcggggcgaaaactctcaaggatcttaccgctgttgagatccagttcgatgtaacccactcgtgcacccaactgatcttcagcatcttttactttcaccagcgtttctgggtgagcaaaaacaggaaggcaaaatgccgcaaaaaagggaataagggcgacacggaaatgttgaatactcatactcttcctttttcaatattattgaagcatttatcagggttattgtctcatgagcggatacatatttgaatgtatttagaaaaataaacaaataggggttccgcgcacatttccccgaaaagtgccacctgacgcgccctgtagcggcgcattaagcgcggcgggtgtggtggttacgcgcagcgtgaccgctacacttgccagcgccctagcgcccgctcctttcgctttcttcccttcctttctcgccacgttcgccggctttccccgtcaagctctaaatcgggggctccctttagggttccgatttagtgctttacggcacctcgaccccaaaaaacttgattagggtgatggttcacgtagtgggccatcgccctgatagacggtttttcgccctttgacgttggagtccacgttctttaatagtggactcttgttccaaactggaacaacactcaaccctatctcggtctattcttttgatttataagggattttgccgatttcggcctattggttaaaaaatgagctgatttaacaaaaatttaacgcgaattttaacaaaatattaacgcttacaatttccattcgccattcaggctgcgcaactgttgggaagggcgatcggtgcgggcctcttcgctattacgccagctggcgaaagggggatgtgctgcaaggcgattaagttgggtaacgccagggttttcccagtcacgacgttgtaaaacgacggccagtgagcgcgcgtaatacgactcactatagggcgaattggagctccactacgtagtttaaacatcatcaataatataccttattttggattgaagccaatatgataatgagggggtggagtttgtgacgtggcgcggggcgtgggaacggggcgggtgacgtagtagtgtggcggaagtgtgatgttgcaagtgtggcggaacacatgtaagcgacggatgtggcaaaagtgacgtttttggtgtgcgccggtgtacacaggaagtgacaattttcgcgcggttttaggcggatgttgtagtaaatttgggcgtaaccgagtaagatttggccattttcgcgggaaaactgaataagaggaagtgaaatctgaataattttgtgttactcatagcgcgtaatatttgtctagggccgcggggactttgaccgtttacgtggagactcgcccaggtgtttttctcaggtgttttccgcgttccgggtcaaagttggcgttttgattc

SEQ ID NO: 61 - DNA, 32312 bp, Artificial Sequence
  pHCA-Dual-FI-globin-mgmt
ggccgaaggattacatgagcttagaaatgtaattagcatagtgtgtggcatagtgtagataccaaataaatatgatctctccttctactcttgaaaatgcaaacacattcttggtggtcctaaaatagcctgtaacatggtttactcagcagcatttgctattcaaggcagatctgcctttagtcattggctgcgctcctgaacagctgtgtgaaaggctaacttttgtaaaccaaatcaaaataaaatgcagcaaaaatttgtcactgaaaggaaatcctcagtatatccttttatgaaatgaaagatccctcatccaaacttaacttttttaaaagtgcgcatttggagatatagccctttcttatgaatcctaattcaattttggccataaacacacgttgatgttccccaccccaaagcacatagcaacaagagtaggttctatattgaaaataatgacaatttaaaaacatgtacttatttcactgtatgtggacagtgtctatgattgcatcatgaagtgtcatataaccatgtacgtgtacatgagagagagatagagagagaagtggtagggtggtggtggtagaggggatggcgatagtaatcatggtaatggtagaggtgatggaggtggtaatgacggaggtaagggtggtagtgatgatggtggtggtggtaatggtggtggatgtggtggtggcaattgggatggtgggatggtggtagccatggtgatggtggtaatggtgttgatttaaagggtggtggtagtgaaggtgagggtagtggtggtggaggtggtggtgctggtagcaatagtgatggtggtgatggtgttgatgagggtgttgggatcagggtgagttcccacagtatatttcattcttgttgtaccactctgtcaacagcaccactgactgggacagaggaagaaggcacactctgaatgtgttattaacagaaacctcaaaacagtctgtctccttgtagtcattcaaaattatctttttcttacctggaaaactgaaactgaattaccgggaaaaacacaggagatttttgtttgttaatatgctgccaataaagtaattttatgtcaaatttaactacaggaaagggcaaggcattttctaagttccttagatgtcatgtggctaaaaaaaacaaaaggatggacagcagttagatactgtacacttagctgtttgaagccatatattcagaaagcagatgttgggagttggtgtttgaggactgatttcctggaggtattttatataggccaagttcattgttctaaactctaagggcttgacttgagggaggaaaagaggcaagaacatgtttagttttgctgacagcatcacatgggcagccctaaggctagacaactttagggcctgaagcttattctaggaaagaagcacctacagagtggcactgggctcccctccactatagagatgaagtcatatgacagtaaagggcaggcagggctgcctagggggcccagaactgacacttccattagaatgagcacaggccagggagagaagtggggaaccagagagaaggagctggaattcctttctctccatacataaatgcctgcagagtcccatttcagaatccggcagacaaagccaccaatgtgatccccatgaccttataaacattcattaaaatgcatttcaaggcatgtgatggcctccccaccccctagataatgagaaaacaaaggtttctcttctgatagagacaagttcagctctgaagtcaacattatttctggttctgtctgaacaatgacatatggcaactcttccctttctatagttctagtccagaatgacaaaaaaggggaaaaatttcttagagaaggtagagattatacgaatacagtccatgaaatgagcataaggagaataaagaatataacttatccaaagaagtctggcaggctgttataaatgcttgattttggacactgtagttggaggtttaacatggacaccaataaaaaggtcagcaaagggtatgcactgttcctattgggcaagaagataggaggtcaaaggtaaccaggaaagataaactcagggagacttattttccctccagagggcactgggcttgtaggccctgggcaaaattgtcaaaaaggtgaaaatcgcctgtggtttatttagtctgctctttcttcactagtgcctcaccagttcagttcaggccaatttgctagctaccacatttgtagaggttttacttgctttaaaaaacctcccacacctccccctgaacctgaaacataaaatgaatgcaattgttgttgttaacttgtttattgcagcttataatggttacaaataaagcaatagcatcacaaatttcacaaataaagcatttttttcactgcattctagttgtggtttgtccaaactcatcaatgtatcttatcatgtctgaagctttctaggtattgaataagaaaaatgaagttaaggtggttgatggtaacactatgctaataactgcagagccagaagcaccataagggacatgataagggagccagcagacctctgatctcttcctgaatgctaatcttaaacatcctgaggaagaatgggacttccatttggggtgggcctatgatagggtaataagacagtagtgaatatcaagctacaaaaagccccctttcaaattcttctcagtcctaacttttcatactaagcccagtccttccaaagcagactgtgaaagagtgatagttccgggagactagcactgcagattccgggtcactgtgagtgggggaggcagggaagaagggctcacaggacagtcaaaccatgccccctgtttttccttcttcaagtagacctctataagacaacagagacaactaaggctgagtggccaggcgaggagaaaccatctcgccgtaaaacatggaaggaacacttcaggggaaaggtggtatctctaagcaagagaactgagtggagtcaaggctgagagatgcaggataagcaaatgggtagtgaaaagacattcatgaggacagctaaaacaataagtaatgtaaaatacagcatagcaaaactttaacctccaaatcaagcctctacttgaatccttttctgagggatgaataaggcataggcatcaggggctgttgccaatgtgcattagctgtttgcagcctcaccttctttcatggagtttaagatatagtgtattttcccaaggtttgaactagctcttcatttctttatgttttaaatgcactgacctcccacattccctttttagtaaaatattcagaaataatttaaatacatcattgcaatgaaaataaatgttttttattaggcagaatccagatgctcaaggcccttcataatatcccccagtttagtagttggacttagggaacaaaggaacctttaatagaaattggacagcaagaaagcgagcttagtgatacttgtgggccagggcattagccacaccagccaccactttctgataggcagcctgcactggtggggtggcggccgccctaggattatggcactggtagaattcactacttatggcactggtagaattcactacttatggcactggtagaattcactacttatggcactggtagaattcactatcgttgtgcttgatctaaccatgtttcattgtgcttgatctaaccatgtttcattgtgcttgatctaaccatgtttcattgtgcttgatctaaccatgtatcgcccgggggcggccgcacacaaaaaaccaacacacagatctaatgaaaataaagatcttttattgaattcttagctggcctccacctttctcttcttcttggggctgtcgcctcccagctgagacaggtcgatccgtgtctcgtacaggccggtgatgctctggtggatcagggtggcgtccagcacctctttggtgctggtgtacctcttccggtcgatggtggtgtcaaagtacttgaaggcggcaggggctcccagattggtcagggtaaacaggtggatgatattctcggcctgctctctgatgggcttatcccggtgcttgttgtaggcggacagcactttgtccagattagcgtcggccaggatcactctcttggagaactcgctgatctgctcgatgatctcgtccaggtagtgcttgtgctgttccacaaacagctgtttctgctcattatcctcgggggagcccttcagcttctcatagtggctggccaggtacaggaagttcacatatttggagggcagggccagttcgtttcccttctgcagttcgccggcagaggccagcattctcttccggccgttttccagctcgaacagggagtacttaggcagcttgatgatcaggtcctttttcacttctttgtagcccttggcttccagaaagtcgatgggattcttctcgaagctgcttctttccatgatggtgatccccagcagctctttcacactcttcagtttcttggacttgcccttttccactttggccaccaccagcacagaataggccacggtggggctgtcgaagccgccgtacttcttagggtcccagtccttctttctggcgatcagcttatcgctgttcctcttgggcaggatagactctttgctgaagccgcctgtctgcacctcggtctttttcacgatattcacttggggcatgctcagcactttccgcacggtggcaaaatcccggcccttatcccacacgatctccccggtttcgccgtttgtctcgatcagaggccgcttccggatctcgccgttggccagggtaatctcggtcttgaaaaagttcatgatgttgctgtagaagaagtacttggcggtagccttgccgatttcctgctcgctcttggcgatcatcttccgcacgtcgtacaccttgtagtcgccgtacacgaactcgctttccagcttagggtactttttgatcagggcggttcccacgacggcgttcaggtaggcgtcgtgggcgtggtggtagttgttgatctcgcgcactttgtaaaactggaaatccttccggaaatcggacaccagcttggacttcagggtgatcactttcacttcccggatcagcttgtcattctcgtcgtacttagtgttcatccgggagtccaggatctgtgccacgtgctttgtgatctgccgggtttccaccagctgtctcttgatgaagccggccttatccagttcgctcaggccgcctctctcggccttggtcagattgtcgaactttctctgggtaatcagcttggcgttcagcagctgccgccagtagttcttcatcttcttcacgacctcttcggagggcacgttgtcgctcttgccccggttcttgtcgcttctggtcagcaccttgttgtcgatggagtcgtccttcagaaagctctgaggcacgatatggtccacatcgtagtcggacagccggttgatgtccagttcctggtccacgtacatatcccgcccattctgcaggtagtacaggtacagcttctcgttctgcagctgggtgttttccacggggtgttctttcaggatctggctgcccagctctttgatgccctcttcgatccgcttcattctctcgcggctgttcttctgtcccttctgggtggtctggttctctctggccatttcgatcacgatgttctcgggcttgtgccggcccatcactttcacgagctcgtccaccaccttcactgtctgcaggatgcccttcttaatggcggggctgccggccagattggcaatgtgctcgtgcaggctatcgccctggccggacacctgggctttctggatgtcctctttaaaggtcaggctgtcgtcgtggatcagctgcatgaagtttctgttggcgaagccgtcggacttcaggaaatccaggattgtcttgccggactgcttgtcccggatgccgttgatcagcttccggctcagcctgccccagccggtgtatctccgccgcttcagctgcttcatcactttgtcgtcgaacaggtgggcataggttttcagccgttcctcgatcatctctctgtcctcaaacagtgtcagggtcagcacgatatcttccagaatgtcctcgttttcctcattgtccaggaagtccttgtccttgataattttcagcagatcgtggtatgtgcccagggaggcgttgaaccgatcttccacgccggagatttccacggagtcgaagcactcgattttcttgaagtagtcctctttcagctgcttcacggtcactttccggttggtcttgaacagcaggtccacgatggcctttttctgctcgccgctcaggaaggcgggctttctcattccctcggtcacgtatttcactttggtcagctcgttatacacggtgaagtactcgtacagcaggctgtgcttgggcagcaccttctcgttgggcaggttcttatcgaagttggtcatccgctcgatgaagctctgggcggaagcgcccttgtccaccacttcctcgaagttccagggggtgatggtttcctcgctctttctggtcatccaggcgaatctgctgtttcccctggccagagggcccacgtagtaggggatgcggaaggtcaggatcttctcgatcttttcccggttgtccttcaggaatgggtaaaaatcttcctgccgccgcagaatggcgtgcagctctcccaggtggatctggtgggggatgctgccgttgtcgaaggtccgctgcttccgcagcaggtcctctctgttcagcttcacgagcagttcctcggtgccgtccatcttttccaggatgggcttgatgaacttgtagaactcttcctggctggctccgccgtcaatgtagccggcgtagccgttcttgctctggtcgaagaaaatctctttgtacttctcaggcagctgctgccgcacgagagctttcagcagggtcaggtcctggtggtgctcgtcgtatctcttgatcatagaggcgctcaggggggccttggtgatctcggtgttcactctcaggatgtcgctcagcaggatggcgtcggacaggttcttggcggccagaaacaggtcggcgtactggtcgccgatctgggccagcaggttgtccaggtcgtcgtcgtaggtgtccttgctcagctgcagtttggcatcctcggccaggtcgaagttgctcttgaagttgggggtcaggcccaggctcagggcaatcaggttgccgaacaggccattcttcttctcgccgggcagctgggcgatcagattttccagccgtctgctcttgctcagtctggcagacaggatggccttggcgtccacgccgctggcgttgatggggttttcctcgaacagctggttgtaggtctgcaccagctggatgaacagcttgtccacgtcgctgttgtcggggttcaggtcgccctcgatcaggaagtggccccggaacttgatcatgtgggccagggccagatagatcagccgcaggtcggccttgtcggtgctgtccaccagtttctttctcaggtggtagatggtggggtacttctcgtggtaggccacctcgtccacgatgttgccgaagatggggtgccgctcgtgcttcttatcctcttccaccaggaaggactcttccagtctgtggaagaagctgtcgtccaccttggccatctcgttgctgaagatctcttgcagatagcagatccggttcttccgtctggtgtatcttcttctggcggttctcttcagccgggtggcctcggctgtttcgccgctgtcgaacagcagggctccgatcaggttcttcttgatgctgtgccggtcggtgttgcccagcaccttgaatttcttgctgggcaccttgtactcgtcggtgatcacggcccagcccacagagttggtgccgatgtccaggccgatgctgtacttcttgtcggacgcttcgaccttgcgctttttcttcggcgaagcgtaatctggaacatcgtatgggtacatggtggccctaggatcgattactagctcacgacacctgaaatggaagaaaaaaactttgaaccactgtctgaggcttgagaatgaaccaagatccaaactcaaaaagggcaaattccaaggagaattacatcaagtgccaagctggcctaacttcagtctccacccactcagtgtggggaaactccatcgcataaaacccctccccccaacctaaagacgacgtactccaaaagctcgagaactaatcgaggtgcctggacggcgcccggtactccgtggagtcacatgaagcgacggctgaggacggaaaggcccttttcctttgtgtgggtgactcacccgcccgctctcccgagcgccgcgtcctccattttgagctccctgcagcagggccgggaagcggccatctttccgctcacgcaactggtgccgaccgggccagccttgccgcccagggcggggcgatacacggcggcgcgaggccaggcaccagagcaggccggcgagcttgagactacccccgtccgattctcggtggccgcgctcgcaggccccgcctcgccgaacatgtgcgctgggacgcacgggccccgtcgccgcccgcggccccaaaaaccgaaataccagtgtgcagatcttggcccgcatttacaagactatcttgccagaaaaaaagcgtcgcagcaggtcatcaaaaattttaaatggctagagacttatcgaaagcagcgagacaggcgcgaaggtgccaccagattcgcacgcggcggccccagcgcccaggccaggcctcaactcaagcacgaggcgaaggggctccttaagcgcaaggcctcgaactctcccacccacttccaacccgaagctcgggatcaagaatcacgtactgcagccaggggcgtggaagtaattcaaggcacgcaagggccataacccgtaaagaggccaggcccgcgggaaccacacacggcacttacctgtgttctggcggcaaacccgttgcgaaaaagaacgttcacggcgactactgcacttatatacggttctcccccaccctcgggaaaaaggcggagccagtacacgacatcactttcccagtttaccccgcgccaccttctctaggcaccggttcaattgccgacccctccccccaacttctcggggactgtgggcgatgtgcgctctgcccactgacgggcaccggagcctcacgcatgctcttctccacctcagtgatgacgagagcgggcgggtgagggggcgggaacgcagcgatctctgggttctacgttagtgggagtttaacgacggtccctgggattccccaaggcaggggcgagtccttttgtatgaattactcaaatcgattaggatccggcgcgcccaccgcggaaaaaaagcaccgactcggtgccactttttcaagttgataacggactagccttattttaacttgctatttctagctctaaaacaacccttcctggagcctgtgcggtgtttcgtcctttccacaagatatataaagccaagaaatcgaaatactttcaagttacgataagcatatgatagtccattttaaaacataattttaaaactgcaaactacccaagaaattattactttctacgtcacgtattttgtactaatatctttgtgtttacagtcaaattaattccaattatctctctaacagccttgtatcgtatatgcaaatatgaaggaatcatgggaaataggccctcggcgcgcccaccgcggaaaaaaagcaccgactcggtgccactttttcaagttgataacggactagccttattttaacttgctatttctagctctaaaactgccttgaccaatagccttgcggtgtttcgtcctttccacaagatatataaagccaagaaatcgaaatactttcaagttacggtaagcatatgatagtccattttaaaacataattttaaaactgcaaactacccaagaaattattactttctacgtcacgtattttgtactaatatctttgtgtttacagtcaaattaattctaattatctctctaacagccttgtatcgtatatgcaaatatgaaggaatcatgggaaataggccctcggatccttaattgctagcctctaactcctagaccgtcagaactgctgggcccttcaagacgggctgctcacacccactcatgttaagcctggtgaggcctgtactctgttttcacaggaagaaatcctcacccagtcttccccaaacacattcccaggttctgtcattagtgggatagagatgattactgtggggagaagagaaacatctggatggatttggtgaggttgatctatagaggaagtaggtgctgcctgaggtagctgtaatagaagctaaaggtcaaaggagagggccctgtcccaatccagatgactccacttctgctggacccaggttcacaagcttaatctacatttcacctaaatttggctaacaagcccaaaatcacacaggcaaagggagaagtggaggcagaaccgaggttggaggccaccagggccaccgggcagagatcatttaagcccaaccttctcacttctccctgggctctgcctctcttaaaggaccttgtggtgtgacctcttgtaggtccctttcacactcggggcctcagtttccccactgtaaagtgaatgggtcccagctttggtaagcttatgcttacctgatgctttcttcctgggctgctcttgtagagaaaagataaatcttcttcctccatccacgagggcttctttccctgggggtgagagtaggctgaggagagccacttgcacacactcttaaagaaagtattacctgcaccagctcagtgagaggcacagatcagactgttacttgaatcaaattatgagcctccccaaatatatctatgacatttaaataggggattacttgaacatagactttgggatccggtgtggagtgcaggagactagcaaagtgaatcctgagagtagcaggtctgcacctgttggatcgagaaaggcggcctacaattctggtcaaatgagctgtgcttattgacatattctattagagagtactaccaggtcaccagtcaccagaaaggctgccagctctccaaccacctccagggaactatcctgaatggggccttaacaagcctaagagagggttggtttgggtcccaagccaatatttgctctgctttatgtcagtcatatggaacccaaaccaaccctctcctatgtgcctcaccagtcggtgcagggatcccaatttcaagtttggttttttatggtcaaagtccagcatagattaaatgaaggggtgtgatgatggtgttaaaagagaactccagaccagtttaactcttggacacacatcccatctcaccatggtgcttccaaccttccagagatgatgggctcctattttctgatgacaaagccctccacaggattgctgcctggccatcagggagtgcctctgtaactgaggctgagatcccactttcagtcctccagctgtggcccatccctgctccgcccaccgggtatggcctgtcctaggctcttaggtatggctgcattgtgaaatgatggctacagagctggcatctcctgtagtctggttcatctagtgcactacctcatagttaaaagaaatctgtttaagccactgagggtggctcctagtgccaactccaagaacaggaagcttcccttttttgggaggaggggcagatggtaacatggatcgtccaggtcaatgggagcagggcaaccacagtaagtactggacaacaacacaaaactccatgtgtggcttccatcgagtccctctccaattggtttggtcttctccgtcccatgcagcactttagcaaggggcctggctgaaggctatgaattgtgtggagcctcctcattgcagtctccaaccatctgatgctgggaaaatgtcaccaggatgcagccatgccgtgtggccaatgaaccgagaaaacaccccttttctagaatgctctaaagaggcagaataatccagaggtgaggaaggaaatactccaccagagacccaggcagttcctacaaaagccagactttccttcacctagggagtgacaagaccagtggaaaacactctcaagcagtaacccccaaatgctctgcaagccagtggcgtccagataccgcacaagcgagtgggctgtctaatcccatcatcatgatgtaaatatctctaggctgccccgggctgtgcctgaccctgtcttcagctttccacacctccacctacagcccatgcacagaaggaccacccaggaatgctgcaagtgtggcacctccagggccacccagggagaaggagggcagctatgctggtggctccaggcccatttggcgggtggtaccttcacaccacaaagcccaaactgaggccccagatttggctgatgagggcatattggacaggggtcacttatgctcttccccattgccacctggcctctggctacctggacttggctacctgtggatcctctcacaggtgccaccatcttggctgagtctccagatgcgaggtccctgaggcagtggcaggcttctcgctaatgctgatgggattaggaatgggataggtggggagggccctggactgggccctgatgagccaagtgggtttttagaggggctactggtacatttcagggacaggacatctggtagagctaagctggggcaataaggagccactgctaatctgagagctagaaacaatcagcttctgggtcattattaattagggtagtttgggctgtgtggaagtcacgtactatatggggtagccacagctctctctacagataatctctaagacttctgattgggaccgtgtgaatgcagtagcaatatctcttcttactgccaggccctgccagtcctgcctccacgccctggctggccccccttatgatctgacccatgccaggctgccatagtatgttacttctgcattagcactccttgggacctgcctctccactgtccctcagactttaaagaactatacaaacccaaggggctcttcccaagagaattgatatgacttgaggtgattccatttctggaagtagtcactccattttctgcctcactctttcagtgcttcacagagcaggttcgattaagcacacagattaatcgtaactataacggtcctaaggtagcgaaagcttgcatgcctgcaggtcgactctagaggatcaaacctagccaccgcggtggcggccggctagccggctagccggctagccctagaactagtaacggccgccagtgtgctggaattcggcttgtaaggtaccggtgaagttcctatactttctagagaataggaacttcggaataggaacttctacctagatgcatgctcgagcggcccctacagttgaagtcggaagtttacatacacttaagttggagtcattaaaactcgtttttcaactactccacaaatttcttgttaacaaacaatagttttggcaagtcagttaggacatctactttgtgcatgacacaagtcatttttccaacaattgtttacagacagattatttcacttataattcactgtatcacaattccagtgggtcagaagtttacatacactaagttgactgtgcctttaaacagcttggaaaattccagaaaatgatgtcatggctttagaagcttctgatagactaattgacatcatttgagtcaattggaggtgtacctgtggatgtatttcaaggaattctgtggaatgtgtgtcagttagggtgtggaaagtccccaggctccccagcaggcagaagtatgcaaagcatgcatatcgatactagtttataagatctcgagctagggtaccgtcaaggctgcagtgagacatgatcttgccactgcactccagcctggacagcagagtgaaaccttgcctcacgaaacagaatacaaaaacaaacaaacaaaaaactgctccgcaatgcgcttccttgatgctctaccacataggtctgggtactttgtacacattatctcattgctgttcataattgttagattaattttgtaatattgatattattcctagaaagctgaggcctcaagatgataacttttattttctggacttgtaatagctttctcttgtattcaccatgttgtaactttcttagagtagtaacaatataaagttattgtgagtttttgcaaacacagcaaacacaacgacccatatagacattgatgtgaaattgtctattgtcaatttatgggaaaacaagtatgtactttttctactaagccattgaaacaggaataacagaacaagattgaaagaatacattttccgaaattacttgagtattatacaaagacaagcacgtggacctgggaggagggttattgtccatgactggtgtgtggagacaaatgcaggtttataatagatgggatggcatctagcgcaatgactttgccatcacttttagagagctcttggggaccccagtacacaagaggggacgcagggtatatgtagacatctcattctttttcttagtgtgagaataagaatagccatgacctgagtttatagacaatgagcccttttctctctcccactcagcagctatgagatggcttgccctgcctctctactaggctgactcactccaaggcccagcaatgggcagggctctgtcagggctttgatagcactatctgcagagccagggccgagaaggggtggactccagagactctccctcccattcccgagcagggtttgcttatttatgcatttaaatgatatatttattttaaaagaaataacaggagactgcccagccctggctgtgacatggaaactatgtagaatattttgggttccatttttttttccttctttcagttagaggaaaaggggctcaggatccacttgcccagtgttcttccttagttcctaccttcgaccttgatcctcctttatcttcctgaaccctgctgagatgatctatgtggggagaatggcttctttgagaaacatcttcttcgttagtggcctgcccctcattcccactttaatatccagaatcactataagaagaatataataagaggaataactcttattataggtaagggaaaattaagaggcatacgtgatgggatgagtaagagaggagagggaaggattaatggacgataaaatctactactatttgttgagaccttttatagtctaatcaattttgctattgttttccatcctcacgctaactccataaaaaaacactattattatctttattttgccatgacaagactgagctcagaagagtcaagcatttgcctaaggtcggacatgtcagaggcagtgccagacctatgtgagactctgcagctactgctcatgggccctgtgctgcactgatgaggaggatcagatggatggggcaatgaagcaaaggaatcattctgtggataaaggagacagccatgaagaagtctatgactgtaaatttgggagcaggagtctctaaggacttggatttcaaggaattttgactcagcaaacacaagaccctcacggtgactttgcgagctggtgtgccagatgtgtctatcagaggttccagggagggtggggtggggtcagggctggccaccagctatcagggcccagatgggttataggctggcaggctcagataggtggttaggtcaggttggtggtgctgggtggagtccatgactcccaggagccaggagagatagaccatgagtagagggcagacatgggaaaggtgggggaggcacagcatagcagcatttttcattctactactacatgggactgctcccctatacccccagctaggggcaagtgccttgactcctatgttttcaggatcatcatctataaagtaagagtaataattgtgtctatctcatagggttattatgaggatcaaaggagatgcacactctctggaccagtggcctaacagttcaggacagagctatgggcttcctatgtatgggtcagtggtctcaatgtagcaggcaagttccagaagatagcatcaaccactgttagagatatactgccagtctcagagcctgatgttaatttagcaatgggctgggaccctcctccagtagaaccttctaaccagctgctgcagtcaaagtcgaatgcagctggttagactttttttaatgaaagcttgcatgcagcactttgggaggctgaggtgggtggactgcttggagctcaggagttcaagaccatcttggacaacatggtgataccctgcctctacaaaaagtacaaaaattagcctggcatggtggtgtgcacctgtaatcccagctattagggtggctgaggcaggagaattgcttgaacccgggaggcggaggttgcagtgagctgagatcgtgccactgcactccagcctgggggacagagcacattataattaactgttattttttacttggactcttgtggggaataagatacatgttttattcttatttatgattcaagcactgaaaatagtgtttagcatccagcaggtgcttcaaaaccatttgctgaatgattactatactttttacaagctcagctccctctatcccttccagcatcctcatctctgattaaataagcttcagtttttccttagttcctgttacatttctgtgtgtctccattagtgacctcccatagtccaagcatgagcagttctggccaggcccctgtcggggtcagtgccccacccccgccttctggttctgtgtaaccttctaagcaaaccttctggctcaagcacagcaatgctgagtcatgatgagtcatgctgaggcttagggtgtgtgcccagatgttctcagcctagagtgatgactcctatctgggtccccagcaggatgcttacagggcagatggcaaaaaaaaggagaagctgaccacctgactaaaactccacctcaaacggcatcataaagaaaatggatgcctgagacagaatgtgacatattctagaatatattatttcctgaatatatatatatatatacacatataccatatgaaacacctctaggctataaggcaacagagctccttttttttttttctgtgctttcctggctgtccaaatctctaatgataagcatacttctattcaatgagaatattctgtaagattatagttaagaattgtgggagccattccgtctcttatagttaaatttgagcttcttttatgatcactgtttttttaatatgctttaagttctggggtacatgtgccatggtggtttgctgcacccatcaacccgtcatctacattaggtatttctcctaatgctatccttcccctagccccccacccccaacaggccccagtgtgtgatgttcccctccctgtgtccatggatcactggtttttttttgttttttttttttttttaaagtctcagttaaatttttggaatgtaatttattttcctggtatcctaaggacttgcaagttatctggtcactttagccctcacgttttgatgataatcacatatttgtaaacacaacacacacacacacacacacacacatatatatatatataaaacatatatatacataaacacacataacatatttatcgggcatttctgagcaactaatcatgcaggactctcaaacactaacctatagccttttctatgtatctacttgtgtagaaaccaagcgtggggactgagaaggcaatagcaggagcattctgactctcactgcctttagctaggcccctccctcatcacagctcagcatagtcctgagctcttatctatatccacacacagtttctgacgctgcccagctatcaccatcccaagtctaaagaaaaaaataatgggtttgcccatctctgttgattagaaaacaaaacaaaataaaataagcccctaagctcccagaaaacatgactaaaccagcaagaagaagaaaatacaataggtatatgaggagactggtgacactaagtgtctgaatgaggcttgagtacagaaaagaggctctagcagcatagtggtttagaggagatgtttctttccttcacagatgccttagcctcaataagcttgcggttgtggaagtttacttgtttatcaccggtgacgtccatgagcaaattaagaaaaacaacaacaaatgaatgcatatatatgtatatgtatgtgtgtatatatacacatatatatatatattttttttcttttcttaccagaaggttttaatccaaataaggagaagatatgcttagaactgaggtagagttttcatccattctgtcctgtaagtattttgcatattctggagacgcaggaagagatccatctacatatcccaaagctgaattatggtagacaaaactcttccacttttagtgcatcaatttcttatttgtgtaataagaaaattgggaaaacgatcttcaatatgcttaccaagctgtgattccaaatattacgtaaatacacttgcaaaggaggatgtttttagtagcaatttgtactgatggtatggggccaagagatatatcttagagggagggctgagggtttgaagtccaactcctaagccagtgccagaagagccaaggacaggtacggctgtcatcacttagacctcaccctgtggagccacaccctagggttggccaatctactcccaggagcagggagggcaggagccagggctgggcataaaagtcagggcagagccatctattgcttacatttgcttctgacacaactgtgttcactagcaacctcaaacagacaccatgggtcatttcacagaggaggacaaggctactatcacaagcctgtggggcaaggtgaatgtggaagatgctggaggagaaaccctgggaaggtaggctctggtgaccaggacaagggagggaaggaaggaccctgtgcctggcaaaagtccaggtcgcttctcaggatttgtggcaccttctgactgtcaaactgttcttgtcaatctcacaggctcctggttgtctacccatggacccagaggttctttgacagctttggcaacctgtcctctgcctctgccatcatgggcaaccccaaagtcaaggcacatggcaagaaggtgctgacttccttgggagatgccataaagcacctggatgatctcaagggcacctttgcccagctgagtgaactgcactgtgacaagctgcatgtggatcctgagaacttcaaggtgagtccaggagatgtttcagccctgttgcctttagtctcgaggcaacttagacaactgagtattgatctgagcacagcagggtgtgagctgtttgaagatactggggttgggggtgaagaaactgcagaggactaactgggctgagacccagtggtaatgttttagggcctaaggagcgcctctaaaaatctagatggacaattttgactttgagaaaagagaggtggaaatgaggaaaatgacttttattagattccagtagaaagaactttcatctttccctcatttttgttcgttttaaaacatctatctggaggcaggacaagtatggtcgttaaaaagatgcaggcagaaggcatatattggctcagtcaaagtggggaactttggtggccaaacatacattgctaaggctattcctatatcagctggacacatataaaatgctgctaatgcttcattacaaacttatatcctttaattccagatgggggcaaagtatgtccaggggtgaggaacaattgaaacatttgggctggagtagattttgaaagtcagctctgtgtgtgtgtgtgtgtgcgcgcgcgcgtgtgtgtgtgtgtgtgtcaacgtgtgtttcttttaacgtcttcagcctacaacatacagggttcatggtggcaagaagatagcaagatttaaattatggccagtgactagtgcttgaaggggaacaactacctgcatttaatgggaaggcaaaatctcaggctttgagggaagttaacataggcttgattctgggtagaagctgggtgtgtagttatctggaggccaggctggagctctcagctcactatgggttcatctttattgtctcctttcatctcaacagctcctgggaaatgtgctggtgaccgttttggcaatccatttcggcaaagaattcacccctgaggtgcaggcttcctggcagaagatggtgactgcagtggccagtgccctgtcctccagataccactgagcctcttgcccatgattcagagctttcaaggataggctttattctgcaagcaattcaaataataaatctattctgctgagagatcacacatgattttcttcagctcttttttttacatctttttaaatatatgagccacaaagggtttatattgagggaagtgtgtatgtgtatttctgcatgcctgtttgtgtttgtggtgtgtgcatgctcctcatttatttttatatgagatgtgcattttgttgagcaaataaaagcagtaaagacacttgtacacgggagttctgcaagtgggagtaaatggtgtaggagaaatccggtgggaagaaagacctctataggacaggacttctcagaaacagatgttttggaagagatgggaaaaggttcagtgaagacctgggggctggattgattgcagctgagtagcaaggatggttcttaatgaagggaaagtgttccaagctttaggaattcaaggtttagtcaggtgtagcaattctattttattaggaggaatactatttctaatggcacttagcttttcacagcccttgtggatgcctaagaaagtgaaattaatcccatgccctcaagtgtgcagattggtcacagcatttcaagggagagacctcattgtaagactctgggggaggtggggacttaggtgtaagaaatgaatcagcagaggctcacaagtcagcatgagcatgttatgtctgagaaacagaccagcactgtgagatcaaaatgtagtgggaagaatttgtacaacattaattggaaggcttacttaatggaatttttgtatagttggatgttagtgcatctctataagtaagagtttaatatgatggtgttacggacctaatgtttgtgtctcctcaaaattcacatgctgaatccccaactcccaactgaccttatctgtgggggaggcttttgaaaagtaattaggtttagatgagctcataagagcagatccccatcataaaattattttccttatcagaagcagagagacaagccatttctctttcctcccggtgaggacacagtgagaagtccgccatctgcaatccaggaagagaaccctgaccacgagtcagccttcagaaatgtgagaaaaaactctgttgttgaagccacccagtcttttgtattttgttatagcaccttgcactgagtaaggcagatgaagaaggagaaaaaaataagcttatcgaaacgcgtccccatcctcactgactccgtcctggagttggatgagagataatggccttacgttgtgccaggggagggtcgggctggatttagcaagatttaccttctccaaagagcggtgctgcagtggcacagctgcccacggaggtgggggggtcaccgtccctggaggtgatgaagaactgtggggatgtggcactgagggacatggccagtgggcacggtgggtgggttggggttggtcttggggatcttggagggcttttccagccttcatgatttgacgattgtatgaacatctacatggcaattctccagctgcctgtcccagtcctactgacccagctgtatctctccaggcaagctcttccaccccttctgcttgcatccagacaccatcaaacatgcaggctcagacacagggaccagcagtgtctgtggcctttttgtgctcctctccatgctgggttttaacttgctctttgtccttctatcctatcttcttatccttaaggctgttctgaacgctgtgacttggagagtgtcccagagccctcaacacctgcatgtcccacgtccatgctgtcctgcacttccttatccccaagatctgcctctccgtgatgcactgaattggcaaacatgtgtcaccccagaccaacaatgtcacagcaaactcccccttgataggacaagggggaatggctttacactgagacaggggaggtttgggttggatatgaggaggcagtttttcccccagagggtggtgacgcactgaacaggttgcccaaggaggctgtggatgccccatccctgcaggcattcaaggccaggctggatgtggctctgggcagcctgggctgctggttgatgaccctgcacatagcagggggttggatctggatgagcactgtgctcctttgcaacccaggccgttctatgattctgtcattctaaatctctctttcagcctaaagctttttccccgtatccccccaggtgtctgcaggctcaaagagcagcgagaagcgttcagaggaaagcgatcccgtgccaccttccccgtgcccgggctgtccccgcacgctgccggctcggggatgcggggggagcgccggaccggagcggagccccgggcggctcgctgctgccccctagcgggggagggacgtaattacatccctgggggctttgggggggggctgtccctatcgattactagtttagccatagagcccaccgcatccccagcatgcctgctattgtcttcccaatcctcccccttgctgtcctgccccaccccaccccccagaatagaatgacacctactcagacaatgcgatgcaatttcctcattttattaggaaaggacagtgggagtggcaccttccagggtcaaggaaggcacgggggaggggcaaacaacagatggctggcaactagaaggcacagtcgctcgaagagcggccgctcgcttcagtttcggccagcaggcggggagcccgaggtagctcccgctcccttgagccaggcccctgccagacctgagctccctcccaagcctggcttccccaaccggtggccttcatgggccagaagccattccttcacggctagccctccggagtagttgcccacggctccgctgctgcagaccactctgtggcacgggatgaggatcttgacaggattgcctctcatggcgcctcccactgctcgcgcggctttggggttgccggccagggcggccaattgctggtaagaaatcacttctccgaatttcacaaccttaagcagcttccataacacctgacgcgtgaacgactcttgctggaaaacgggatggtgaagcgctggcacggggaactcttcgatagcctcgggctggtggaaataggcattcagccaggctgtgcactgcatcaggggctccggacctccgagaaccgcagcgggggctgggacctccacggcatcagctgcagacgtccccttgcccaggagctttatttcgtgcagaccctgctcacaaccagacagctccagcttccccaaagggctgtccagtgtggtgcgtttcatttcacaatccttgtccatggtggcgaccgtctagcccctggggagagaggtcggtgattcggtcaacgagggagccgactgccgacgtgcgctccggaggcttgcagaatgcggaacaccgcgcgggcaggaacagggcccacactaccgccccacaccccgcctcccgcaccgccccttcccggccgctgctctcggcgcgccccgctgagcagccgctattggccacagcccatcgcggtcggcgcgctgccattgctccctggcgctgtccgtctgcgagggtactagtgagacgtgcggcttccgtttgtcacgtccggcacgccgcgaaccgcaaggaaccttcccgacttaggggcggagcaggaagcgtcgccggggggcccacaagggtagcggcgaagatccgggtgacgctgcgaacggacgtgaagaatgtgcgagacccagggtcggcgccgctgcgtttcccggaaccacgcccagagcagccgcgtccctgcgcaaacccagggctgccttggaaaaggcgcaaccccaaccccgtggaaataaatcgataactagtgatatcatcatgtctggatcccatcacaaagctctgacctcaatcctatagaaaggaggaatgagccaaaattcacccaacttattgtgggaagcttgtggaaggctactcgaaatgtttgacccaagttaaacaatttaaaggcaatgctaccaaatactaattgagtgtatgttaacttctgacccactgggaatgtgatgaaagaaataaaagctgaaatgaatcattctctctactattattctgatatttcacattcttaaaataaagtggtgatcctaactgaccttaagacagggaatctttactcggattaaatgtcaggaattgtgaaaaaagtgagtttaaatgtatttggctaaggtgtatgtaaacttccgacttcaactgtaggggatcctctagggccgccagtgtgatggatatctgcagaattcggcttcaggtaccgtcgacgatgtaggtcacggtctcgaagccgcggtgcgggtgccagggcgtgcccttgggctccccgggcgcgtactccacctcacccatctggtccatcatgatgaacgggtcgaggtggcggtagttgatcccggcgaacgcgcggcgcaccgggaagccctcgccctcgaaaccgctgggcgcggtggtcacggtgagcacgggacgtgcgacggcgtcggcgggtgcggatacgcggggcagcgtcagcgggttctcgacggtcacggcgggcatgtcgacaagccgaattccagcacactggcggccgttactaggtagctagctcgagccttcgaagatctcctagggaagttcctatactttctagagaataggaacttcggaataggaacttcaccggtgggtgaaaagccgaattctgcagatatcaagcttatcgataccgtcgacctcgagggggggcccggttagatccccgggtaccgagctcgaatatctatgtcgggtgcggagaaagaggtaatgaaatggattaagtggcaggattaatcttcgaacgaaggagccatccaactaaccgtcatgttcgggcaaccgaagaagggagtggcaggatttcctttggagacttctggaattagacagcagtttaatgcaagcatctaaattctcttcctcccagagtctcattaaaactacagtaagagtttgtgttttgttttgtttttaaagacaaaatcccaccaggatagagagaataggagaggagataacagcatcataatttatgaaactaaaatgcagatagaccaggattaactgactacacagcaccaaggaagctgaatcacaagacagcagaggagaaaactggaaaggatcgtggtctatacggcagaatcttcccaagcctcaggaggaggagctctagatgcttatgatggcaactaaagcctaaaagctaattcattttaaagttcttccaaatgcatagggttttatttttccagacctgggttcagatggggaatttgacaaacaatggaaagggggaaaaacaacaatctaaacactgagtgacaaagtaacaaagaaatagtctagctatcagccagtcaagccagccttggctttgctatccaaagtagtcagtctaattctaccaccagtttctgttcctgtagctgtctactgcctgccagggactctgccttcccacccacaactaccaatggaaggatgtggtgaccataccagtggctgctgacatctcctgccatgggaagcataattgcctccagcagcctcccccttagatccatcatttttgttgcacttggcctgggctgtactcccggccaatgactgaacatggtgagcatagtaatgcaggcccatttctgtgaggagcaggactcctccagtaggtgactttggctcaaggactctctattggcctggttgaacttttcctgaactgtgctactgtctgagactcttcttacccaatcctctttctcgccccaattgtcacagaccacctgcattgtggtctgagtctctccccaccttctcttgctcttccctgtttatctttcacaggcatttcccccagtacattccttgaatgtctaacccgatacgggtgcctgacttttggcagacctaagcagacaaaaaggagtacttggttacctagctcttctttctaccacaaacatcgagggaaccctttttccctcacccctctgccacacccccactgccccagtgaacaaccacagagagagctgtggtataatattaggctggtgcaaaagtaattgcggtttttgccattacttttaatggtaaaaaccgcaattacttttgcacctacctagtatttgtgtccccccaaattcatatgttgaaacctaacccacaatatgatgtcattaggaggcaagaccttgaggaggtgattagatgatggggtggagctctcctgaatgagattagtgcccttataagaagaagcccaaggaagctaccttgactcttccatcacatgagaatgcagcaagaaggcaccatctactaatcaggaagagagctctcaccagacactgaatctgccagtgtcttgatcttgaagttcccagcctccagaactatgcataatgcatttccattgtctctaagccacccagcctatggtattttgtcatagcagcctgaactgactaagacagtgagccacatgagaagtgccccaacccctcccttaagcacttggctcacagatcagtgggttcatttctgcctgagttttattgttattctgtagatttcttgggctagatatatttttctgttattttccttcttcacctcagtcatgaattggttgttttaaaaaagacaatgtaagtcatggggaaactcctgacaactctactctcctagggttcctgataaaaggggattcagttgagtcctctgatggtctctacctgccaaagtccagcagcccttagcaaacatgctgctcgtttctgtagagaaggtgctggtgtcccaccatacttctctctccctcatgaagggcttgcgacccagcaaatgggtggcttatatgggtctgtttcaaaggaagagccagctctgggaagaaaaacgatgagcataagcataacctaccactgtgcctgggaaagcagacaacttttttgatgtgtgaatatctaatgagaatggaatccatcaattaccttaaacttaggcacagtcttcaaattcaatatatgtgggatatacttttagtcagtttgtagacgttatttgtaataaataatctggcttctctaaagaaattattttaagtgtttggtttggtttgatttaatggtaaaattatatttagtggcagagaattatagcaatggtgataaactatagagtgtcataagttcatatcttattctcacatttgaagctgcctgcagatgcattcaagatgcagccagaagtcaggagactcaggctgttatttggagctcatcattttacagccttgctggactcccactttctcaggggaaaaatgtggtgttgacccagattagctctccaggccctgctgagttgggcactctgtaagctggagggtcttctattgtcttcacctaagtgtcaatcaacaacccaaatgggcatgggggaagagggagctgggccaatgcccagggtgcctggtagagagataccttgggcactggaaggcaccagcttcccagagagaagggggagggccatgaaaaagttggctgtagatgccagggacactgggactctccagctgtgtgtttgtgtcttctgaagacttatgtttcattcctttggagcatgcataatcatacactgtgggatgtgttatatagattgcttgatagttcaccactgtaataaaatactgtgactggaatctgctcccagtctgcctttgatagcacttgtgcaacacacatttactgagcatttacagtgatccaggacctgtgttgtgaaaacattgatggacaaggcagatggtggagcacgtcagtgaggatttttaacaaaggctggtaagtgctataaaggaacattgtaggacactagagaacaaagaacaggagaacctgacttaggctggggtggggcgttggttagaggaggctccttggaggacatgaggtttaagctgtgacctgaggatgaatagatgttggccaggtgaggttaatctggggctcaagatcgagcattaagcttgtcagccttaccagtaaaaaagaaaacctattaaaaaaacaccactcgacacggcaccagctcaatcagtcacagtgtaaaaaagggccaagtgcagagcgagtatatataggactaaaaaatgacgtaacggttaaagtccacaaaaaacacccagaaaaccgcacgcgaacctacgcccagaaacgaaagccaaaaaacccacaacttcctcaaatcgtcacttccgttttcccacgttacgtaacttcccattttaagaaaactacaattcccaacacatacaagttactccgccctaaaacctacgtcacccgccccgttcccacgccccgcgccacgtcacaaactccaccccctcattatcatattggcttcaatccaaaataaggtatattattgatgatgtttaaactacggcccggtacccagcttttgttccctttagtgagggttaattgcgcgcttggcgtaatcatggtcatagctgtttcctgtgtgaaattgttatccgctcacaattccacacaacatacgagccggaagcataaagtgtaaagcctggggtgcctaatgagtgagctaactcacattaattgcgttgcgctcactgcccgctttccagtcgggaaacctgtcgtgccagctgcattaatgaatcggccaacgcgcggggagaggcggtttgcgtattgggcgctcttccgcttcctcgctcactgactcgctgcgctcggtcgttcggctgcggcgagcggtatcagctcactcaaaggcggtaatacggttatccacagaatcaggggataacgcaggaaagaacatgtgagcaaaaggccagcaaaaggccaggaaccgtaaaaaggccgcgttgctggcgtttttccataggctccgcccccctgacgagcatcacaaaaatcgacgctcaagtcagaggtggcgaaacccgacaggactataaagataccaggcgtttccccctggaagctccctcgtgcgctctcctgttccgaccctgccgcttaccggatacctgtccgcctttctcccttcgggaagcgtggcgctttctcatagctcacgctgtaggtatctcagttcggtgtaggtcgttcgctccaagctgggctgtgtgcacgaaccccccgttcagcccgaccgctgcgccttatccggtaactatcgtcttgagtccaacccggtaagacacgacttatcgccactggcagcagccactggtaacaggattagcagagcgaggtatgtaggcggtgctacagagttcttgaagtggtggcctaactacggctacactagaaggacagtatttggtatctgcgctctgctgaagccagttaccttcggaaaaagagttggtagctcttgatccggcaaacaaaccaccgctggtagcggtggtttttttgtttgcaagcagcagattacgcgcagaaaaaaaggatctcaagaagatcctttgatcttttctacggggtctgacgctcagtggaacgaaaactcacgttaagggattttggtcatgagattatcaaaaaggatcttcacctagatccttttaaattaaaaatgaagttttaaatcaatctaaagtatatatgagtaaacttggtctgacagttaccaatgcttaatcagtgaggcacctatctcagcgatctgtctatttcgttcatccatagttgcctgactccccgtcgtgtagataactacgatacgggagggcttaccatctggccccagtgctgcaatgataccgcgagacccacgctcaccggctccagatttatcagcaataaaccagccagccggaagggccgagcgcagaagtggtcctgcaactttatccgcctccatccagtctattaattgttgccgggaagctagagtaagtagttcgccagttaatagtttgcgcaacgttgttgccattgctacaggcatcgtggtgtcacgctcgtcgtttggtatggcttcattcagctccggttcccaacgatcaaggcgagttacatgatcccccatgttgtgcaaaaaagcggttagctccttcggtcctccgatcgttgtcagaagtaagttggccgcagtgttatcactcatggttatggcagcactgcataattctcttactgtcatgccatccgtaagatgcttttctgtgactggtgagtactcaaccaagtcattctgagaatagtgtatgcggcgaccgagttgctcttgcccggcgtcaatacgggataataccgcgccacatagcagaactttaaaagtgctcatcattggaaaacgttcttcggggcgaaaactctcaaggatcttaccgctgttgagatccagttcgatgtaacccactcgtgcacccaactgatcttcagcatcttttactttcaccagcgtttctgggtgagcaaaaacaggaaggcaaaatgccgcaaaaaagggaataagggcgacacggaaatgttgaatactcatactcttcctttttcaatattattgaagcatttatcagggttattgtctcatgagcggatacatatttgaatgtatttagaaaaataaacaaataggggttccgcgcacatttccccgaaaagtgccacctgacgcgccctgtagcggcgcattaagcgcggcgggtgtggtggttacgcgcagcgtgaccgctacacttgccagcgccctagcgcccgctcctttcgctttcttcccttcctttctcgccacgttcgccggctttccccgtcaagctctaaatcgggggctccctttagggttccgatttagtgctttacggcacctcgaccccaaaaaacttgattagggtgatggttcacgtagtgggccatcgccctgatagacggtttttcgccctttgacgttggagtccacgttctttaatagtggactcttgttccaaactggaacaacactcaaccctatctcggtctattcttttgatttataagggattttgccgatttcggcctattggttaaaaaatgagctgatttaacaaaaatttaacgcgaattttaacaaaatattaacgcttacaatttccattcgccattcaggctgcgcaactgttgggaagggcgatcggtgcgggcctcttcgctattacgccagctggcgaaagggggatgtgctgcaaggcgattaagttgggtaacgccagggttttcccagtcacgacgttgtaaaacgacggccagtgagcgcgcgtaatacgactcactatagggcgaattggagctccactacgtagtttaaacatcatcaataatataccttattttggattgaagccaatatgataatgagggggtggagtttgtgacgtggcgcggggcgtgggaacggggcgggtgacgtagtagtgtggcggaagtgtgatgttgcaagtgtggcggaacacatgtaagcgacggatgtggcaaaagtgacgtttttggtgtgcgccggtgtacacaggaagtgacaattttcgcgcggttttaggcggatgttgtagtaaatttgggcgtaaccgagtaagatttggccattttcgcgggaaaactgaataagaggaagtgaaatctgaataattttgtgttactcatagcgcgtaatatttgtctagggccgcggggactttgaccgtttacgtggagactcgcccaggtgtttttctcaggtgttttccgcgttccgggtcaaagttggcgttttgattc

SEQ ID NO: 62 - DNA, 32670 bp, Artificial Sequence
  pHCA-sgHBG1-miR
ggccgaaggattacatgagcttagaaatgtaattagcatagtgtgtggcatagtgtagataccaaataaatatgatctctccttctactcttgaaaatgcaaacacattcttggtggtcctaaaatagcctgtaacatggtttactcagcagcatttgctattcaaggcagatctgcctttagtcattggctgcgctcctgaacagctgtgtgaaaggctaacttttgtaaaccaaatcaaaataaaatgcagcaaaaatttgtcactgaaaggaaatcctcagtatatccttttatgaaatgaaagatccctcatccaaacttaacttttttaaaagtgcgcatttggagatatagccctttcttatgaatcctaattcaattttggccataaacacacgttgatgttccccaccccaaagcacatagcaacaagagtaggttctatattgaaaataatgacaatttaaaaacatgtacttatttcactgtatgtggacagtgtctatgattgcatcatgaagtgtcatataaccatgtacgtgtacatgagagagagatagagagagaagtggtagggtggtggtggtagaggggatggcgatagtaatcatggtaatggtagaggtgatggaggtggtaatgacggaggtaagggtggtagtgatgatggtggtggtggtaatggtggtggatgtggtggtggcaattgggatggtgggatggtggtagccatggtgatggtggtaatggtgttgatttaaagggtggtggtagtgaaggtgagggtagtggtggtggaggtggtggtgctggtagcaatagtgatggtggtgatggtgttgatgagggtgttgggatcagggtgagttcccacagtatatttcattcttgttgtaccactctgtcaacagcaccactgactgggacagaggaagaaggcacactctgaatgtgttattaacagaaacctcaaaacagtctgtctccttgtagtcattcaaaattatctttttcttacctggaaaactgaaactgaattaccgggaaaaacacaggagatttttgtttgttaatatgctgccaataaagtaattttatgtcaaatttaactacaggaaagggcaaggcattttctaagttccttagatgtcatgtggctaaaaaaaacaaaaggatggacagcagttagatactgtacacttagctgtttgaagccatatattcagaaagcagatgttgggagttggtgtttgaggactgatttcctggaggtattttatataggccaagttcattgttctaaactctaagggcttgacttgagggaggaaaagaggcaagaacatgtttagttttgctgacagcatcacatgggcagccctaaggctagacaactttagggcctgaagcttattctaggaaagaagcacctacagagtggcactgggctcccctccactatagagatgaagtcatatgacagtaaagggcaggcagggctgcctagggggcccagaactgacacttccattagaatgagcacaggccagggagagaagtggggaaccagagagaaggagctggaattctagtaggacaaacggtaagtgaacaacaagaacaagttaagagtgtgtgcagtattctttcaaagactgaaaaaatagtgatgtgatagaatggcaggtggctctgagcaggccaggagaaggactgggggcagagcatcccaggcaggagggcagcaagtgggaaggccctggggtggggcttttggactgttccagtgacgggcaggcagccagtgtgcctgtcacacaatgcaccagggaagtagtcgtgaatttgcagagggtcttgcaggctatgggaaagggattggattgtattttgtttgtagggaagccatcgggggacttaagcagaggaaggattggcttcatctctttgaaaaagttctctctggatgctgatgggaggagaaatggaaggaaaagaaacacttttaggggcaagaacttttgagaagggtggaattgggagtgtggagttggggccagctttggcacaggaggggaagctaaacacgtggccgcatgagggcctgtaattctacctgaaatgggtaccatttgttagggtaaacaaatgaaccaaatgcccagtgatacagaccaagtgttggcaaacttcttctgtgatggcccaggtagtaaatgtctcaggcttcgcaggccatgtggtctctgttgaagctctgtgtagtagacaatatgttaatgactgggcgtgactgtgtgctaataaaagtttatttacaaaaacagcccgtgggctggatttagctcacaggctgtagtttgccaacctctgacctagagcatgaactgagcatcttcttggagggaaataagttctttccaagttgccctcctcacattgcagggggccatgtaggcccattattcacagaagagtgggtgggcaacctttctggagcagaaaaacgtaaagatttcttccgtagtgcaagtaaggtgaccatttctaaaccgtgcaagtgatccagcagtcccaaaagttgtttcacttctcattgtgcgcccgttctcaggtgctccgaagcttccagtcctttgtagggacatggatgaaattggaaatcatcattctcagtaaactatcgcaagaacaaaaaaccaaacaccgcatattctcactcataggtgggaattgaacaatgagatcacatggacacgggaaggggaacatcacattctggggactgttgtggggtggggggaggggggagggatagcattgggagatatacctaatgctagatgacaagttagtgggtgcagcgcaccagtgtggcacatgtatacatatgtaactaacctgcacaatgtgcacatgtaccctaaaacttaaagtataataataaaagaaaaaaaaaaagagaggagagaaacatcatcccctccaggatacccttgggccttgttcttatagtcttgtacattgttgaacaatttgcatgggctagtggattaaagcacaccctccaccctcaggccctcaagggtctctatgataatacagtctcaccttctaccctttccatcaccatcctaggtgctatggccaaccttgaggctgccatgttaggtctatgcatttcccacctccaccacataactctctgaaggccaggtagtttcctattcatcttggtaaccccaaagcctcgtgacagggctcagctggcatctgcggatgtgaatgaaccattggagaaaatggtactctgcaaataactctgttattttcccatttcctgtgtaaggcctagagacaatgactttttaattgcaccccttcccctctgtatgacactggccttctcttgtgtccagcaatgtgggtggcctagatgatttctaagggacttctggccaagatgaacagcagctgcatcttactgagcatttactatgtgccatatactcagccacagctctaggggcatagaagcaggagctctcagggtcagggcagtgagtgagcaagcgagcacctatgccagccctgcctctggatggggacttgagagggtgatggaagcctgcagcactggagggaggcagacaaagacaggcctgtgctgagggggcccggagcaagagagagggaggcaatgacagcagagacatgcctgcgccttgggtttgagtgcccagtggtcaaatccacttccctgtggctgatgcttgcctttctaactttggaatttaggggttggagatctggtgagaaggtaggagggagatgaggaggagaagggaaaggcaggaaggaaggggagggaaaggaaaagcaaaaggggaggaggaaggtttccaacaaattattctatatcaactgcggaaatcaaaatttgttgcccaaatcttagaagctcatgtccctcctccccagaagtctggaatgcagcactccaggggtagcttataacccaaatatctatctgtaaaaagagaaacattgggctttcgagctgtggattctcagtaaaagcaagaggcctcagcctacacaggccagcccagagtttgaggaaccccaggcccacacccacagggctggcccctgggtctgcatactccctagaaatgtgcacacttctgagcctcaactctgtcctggagtctaacagcatccctctccttcctggggcagttccacctccagaaacctgttaccttgggccttatgtcaaggaaactgtgggaaagagctaggcaggaatgcagatgaggccagcatgggctcctaaaagtttagaaataggcagtgtcatgctcccaggtgcctgcataaaccagctgaaaaatggagctcccctcaccagcactctcccttcaaacagactgtgatttgcaggtcactggtttaccaagccaggctacccaggcaggacccagatgccaagcccagtggtgtcctgcaagctgagcagtgctcagttcttgcaaaaaaaggtctgtgtgaaggcaaggcctctgcctggcttctcaccccagttgggtgtctggaacaggaaggagcccttactgcagaaaaaggaggagggagcaaagggagcgaacagctgcgtgctccatggggaggatccccaaagtagaaaggcgcatacacactgcagcccttgacccagaatgctcacagctacattacagattcaggtctcctcagtgtagtggggctgctgatgagactgtggcatcctcaggggtcaggacacacattttccatcactcttctgatggcaaaaaacctctgagccaatgccaacctctgatcattaaaaaaaagtgctcacagcagtgtgtggtttaggatcatgccctgtgtggtttggaacacgtgcacaaccacaccttgttcatcaccatcccagaaaccctgacgcaggcaaagagcagagttattaaccctactttactgatgtggatactgaggcccagaggctcatgcaagttatcaataagtggcagggacagttgcctctagattaactagcccctaggatcacctgggtcttggaaggggacccataaacatgagctcccctctcttggggccagatttgcacctgtgccgcgccttcagcctgcatgaagtaggggctgctggcaaagactcaaagctgtaaatctgggttttctcttgaggcttctaagggagctgtttcgacaactcactctgttcccagctggctgcccctgcatagggttttaaagcagcctagctttctgccaggcttggcagtggacaacgctggtcagaacatcccagagagctaccagaatgaagtaagtttgcttctactctttacctgtttatgggctgtctctgccactggaatgaaaggcactgagaacagtgcctggcctgcagaaggccctggaaatacctgagctcctaatctgggaataggagtaggaagagctttggaggcagggcacctgagtttgagatctacaacttcctgcctgtgtgacattgggaaagtctccatcctttctgagcctcagtctccaccctggggaagtggaaatatcaatctctgtgacacagaagcaaatgagcgaatgtgcacaaagtaccttgcacaagagagacgctcaaacacttgcctccaggtttcaccgagaactacagagtaagatagatttgttcccagtggaggaagcctgggaataatttgcccctagactatgaattcctggggctcaagatcgagcacagggccaggcacacagaagggaccctggaaatgtggcaggaggccagagatagacaggcccttagagctcatacccatgccctctgacctcaagaagaaagaaacctgctcaaaatctcacaaagagcttgttccaaccctgaatcgagtctgaggactccttcctgagtccagcactttttctgcaagaagtatatgcctccaaagctgatgggcgcaaatcttgaaccccgtcacataaacacaaagggaggaggtgactagagctcctcctactggatatgtctaaggtcaccagtctaaagaaaagggatggatagaatgaggccagtatttttgcagccatccaaatgtccacatacgctgttacactgagggctcctctctcccccgtcttcagccctacttgcatttagaggtgagaaagatatgggctgaggggttgtttttcatcgtattgtagatggaaagcacactgcccttggggccatccaaatgtggaccttgatgtagcaccccaccttctggatggccatccttctgaaagtcactgaatttctcagactttattctctttatccataaagaaggagaataataataatccccccaccctgcccaaccactgactggttgggaagctcagaagaaatactgggcacggcatcccattgtaatctatagagtgagtcgcttcttaatattaaatggctgaacacagaagatgtgcaaaaagtactgtgtccccttcctcctccaactgaacatttcatgccctttgcaccctcattttgtctaggagctgccttatgaagggaataggtacctgctccgagctggaggaatctttgccacttatggtggggtatggactgagacagagatggcatgtgacatgcgcactgagtctcaactccatgcaggctctggagcactctcaaattggagtactaatgccttttaaattctcacactagcaatcctttgacctactgatctagggatctagggaaagaatcgtgatcttaacttcaaagggaaggacaaaatgttctgcctcctgttaaaactccatacactaagtgcagagactggatgccttattaaccttgggtagatgcccaaatgttcaaaaggtcaaactcttctgttccccagatcgccagagtcattaaccagtcacactattaaatgaatgaacagatgctgaaaaggtacttgcattactgagatttcttatggtgatggcccctgcctgatatgtattcagcattttgtagttttcaatgtgcattagagtatagtggtgatgacattggcctctgagtttgccacttcttatatctgtgactttggtcaaattgcttaatctctctgagtctcggtttcctggagataataatagcttcttcttcccagggttatcatgaggattacaggagataatgccccaaaaatgcttagtaaagtgcctagcacctagtcaatgctgaattaaaggtggttattcttacttttcgttcatttgaactttgttctcagggagggcaaaggatagacaaagccccatagctagtgaggagtagctgcaagactagaacccaggtgttctgagccctagtcttaggccaagaacaactgttacgtgagatgcacgttttccttcaagggagctcacaattatttccatgtaaattcaaggactgctaaaagagaactctcctctgggactgatatcattttatttcaagattgatttgaaacatgttttttgtttgtttgtttgttttctaggaaagaacaagagaaccagtcaagctgaatgcctgaagcaaatctctgttagcgatgttttcaggatgagggagagtggtgcaagaaacgtgcttccagatgcacatggtttcctgggactagggttcagggtgtcatccctgggtgttattaagtgtcagaaggagagcaaacaagggaaacatctgagatccagctaaggctacaccctggaaatgcaagcccagctcttgcaaaggacctcctttggccactcaccttccaggccttacaataacttgtttggactgcaggtttcttggtggactcacaggccattctgcttttatttggtcaacctcagttcacaagcacccagatgctgagatcctcagcatgtgcagcagagtttcatattagcactgggtacctttctgaggctacagggataccgtacagcagcacctgtcacgtccagccaaaggagtgggctctctcaatgtcatccaatgctgtttcaactgtgaagaagaccatctgagagagttgcttttggaggctgaggcaaatttttaaaattctttgttctcctcaactggggtgaattcttggtcttctaggacagcttgaagttttagaaagagtcaagccactcagaaccaacagagaactctttcagagaacaaggtgtggcatagaggaggcagagggctgatcttgatcaaatccaaagtgtgactctaaagcaatgaatgtgaatttttggcaaagcttacaaagggctctaaaggccatctgcaaagagaagccaagcctgatcgatgaatcactagtgcggccggatatcgatcggcacgctgttgattttctcatagtaaggaacagtgggccctttcagtcccacttctgtagtctgtggtactacaaatggtgagcccatgatgttgccattcatagggttattctccagcagtaatgactggccagccactcccatagccgcagggctaggatttattgtcaatggagggacctgcagttctgcacaagcagtactaggatgagcacctgggcccattgcaagggtgacatcttcaaggcaaggcctcttaattttattagggtagcccccatcagccatgtctggaaactggaagtggtcttcttcttgtctcctcttaacagttccctgtgaatggaagagaagagaagaggagaagagaggagaggagaagggaagagaggtgacacacacacacacacacacacacacacacacagagagagagagagagagacagagagaaagagagagagagagagagaggaatttttataaaggtttggcacattaaagctaatgaacaggaaatgtgcatgataaaacagacctctcagtttaaagacttatagttgtgaaaactataaaatacagcctgtctttggaaccatagtgcttatttattcattattatgtttcatctaaactgtctaattacatttcaaataaggcattatgttgtctgtatactaaaacgggatagaacgttattcaaagggtaatctgcccacttcaaggagagttcaacaaaactatgcagaagtcactaaatgaaccatgctgccaaaggcaggcattggagagaaaactagaagtagctaaatagttttaattctttcctgtctacagacacatagattttaacgaaggaataccatagtatagaattgaacttttaggctgccttctagtcttggttaaatgcatcaggctgcagtggtaaaattgaatacaacagagcccttacaggaaagaagtagatctggatgtgttttcttggggagctgtttaaaatactgtttttgggaaagcacaagtttcagaacagtcattgtaggcatcgtattcattgttccatttatttttacacacacacacacacacacacacacacacactctcacacattgctatgtgtacacaaaaataatttggaagaacctatacccaacaatttggagtggtcatttatttgggatgactggcaattccctttctattctcttcatttctgcttgtttgtctttaacgagaacgactcataatccaaaaatttaaaaaagtataaagttatctaaataagaaattttcctctgaagatgcatcctcaggttggggagatattaaacaatgagaaaaggccccaatctgggatctgaaccttgggggagctgcccatcatttatagaagcacagcctttgggaacaaagcaaagtcactagcaatgtgagacttcctactcttcatggcttcatacagtcatccatcgctgttgtgttaatgaccatgacctgtatgttagcaggtaaatgggaaaggaagtgggggcaaaggagtatgtgcaggaatgatcaaaataaggaaaggaagagagggatctggaaatcacctgaatgccgataggtgaacaggtagaattcttttaaagcttcccccacccggtaccccccaaataacccctttccagctttggaagtttcactaggacatacagtgctcatcctctgatgtcaccttaagtttggctcttctggtttgatgagcttgtagcccactaggagctcaaggcatgcatggggccacttgccagcacgatgaggggcatgactgtcatggccaagtgaacatcaaagcagatccccagggctgtatgtctcaggccttggtgcacatcagaatcacttagaaacatccacattcctgggccctcccaccacaaactgacagcttcatccagggtgtggcccaggcatcgggagtttttccaacagctccatggctgattctcaacagaaaaccactggcccagagcaagggtggaggcagcgtggcatagggctctgaccttggccttgccactgaacctctcagagccccagtttctttatgtgtaaaatgagtgtaattatagttcttttctcatgaaggtgctctgactattaagtgaaacggggcacattgtatgacacctaatagctcctcactaactggtacccggcattataaagggcaggtatggaagggttctgggagtccaatacccttcttaaagacagagaggtctctgagacccagagaggggcaggccttacccagagttgctcagccagagggcaacaaggcccaggtcagatgcagggcccctccaccaccactcagctgcctccagacccactgccttcgccatgttgttggtaggacactgcatcgcccccacagaaggggcttgccaacttgagtgagaggacttgcacacttctttgacttttcttttgagatgcccacaatctgaacaagggcacttcaagggacagctctgtcaccaaactcatctgaggcctgaataccatgggtcaggcaggaatgggttggagaggtgtagagcaggcacaataagagggctgaggcccatgcagtcatcagtgcccactttcccaggagtctgactgggcacagcacccatagtgtccctgagctggtccatggagcagctcactaactgtttggcccacagcaggtgctcagtaaatggcagttgaacgaatcaatggacaaaggaacataaattacccaacacacagggagctcagccatttactcaatccattatggagtaacctacaaacaagccactgggtcccaaactgaaattgtgtctcttctacattctcccaaagaatccaataggttaaaaatagaaatgtatgaaatagatcaatcagggatgattgcatgtggatttgacataaggatcccctgcagggagtctgagctggcaacagtcaggcccaaagtgctgtccatgatgtctcgaactgcaagacagttttaacaatggcgaagcaatgcagaaccaggcaggccaaggagggggtgggggttggggaaaggaagggagggaaggggctgtgaggggcaatggtctggcatccctgccacgtgagcctctgaaatttgctggcagcttctatgggctcccagagctttcacttaattgttggtctgccactaacctgctgggagtaaggtgcagggatggaggaggcagggcatgaccaccagacactaaaggtaccagctggggccactggcaaagggaaggaggctgcacctctcctacatgagagcccgtatacacacaccttttccagcactcatcaactgcatcccaagcaaatggtccctgatcaattccaattctagaaaccaactgactactcaataacaaagtagatcccagcaggccgccactgctggagcggatgccacttttgctatgccaagtctgtggctggacagctgctggcatgtacactcactgactttcataaggatgcctaataaagggggcaggctcacctggcttttctcaggggtggggtttggggtgccgatagaggctgctgttttggcagagtggcaagctgcaagcctcttctgagctttcatttttcaatggacttcagtgagaattcactttgtcagaggccatgcagctccatgttttggatttcatggaatgagctttcaacagtgagcctgaagtgccctggctgaacagcaagaacaccagccaaccctaaacaaggccgaggagaggcggctgtgtttacacggaaggctcagccttgctgtaatagcgtctgccttcaccagacatcagtgaggcgtggaaatctattatccagttaattttgcccctagataaagacttgctttcgtgtcttctctttcacagtcccatgatctgttactcatctcaactgcgagaagttggctgggctttcccctgtgcccagtgccacactcgtgccttcactgggtcacctgtgcctgtggctgatgccgctgaggttttgcctgcccagactgggtgtttctgactaaatcccacagccaccattttagatcaagggcaggagatagctcactgctccggaatgacctcccctcccagaatcctggtaggggcggaaggtccccaaccaagctcccagccctttctaaatgaatctccctgcttcacccatgtgcttttctccagtctctgcggtcttgatgacagcagggtattagtcctagctgtcccacagctcctacttctttcaggcctctccctgtgacaatcagtagccactggcaggatttcctcagagcatatctcgatttgctttcagacaattagttaaaaggacactggaccccagacgtcccaactcccagccagagccctcacaggcccggcctttggtggtgaggaagggggagggagtgagtgacagtgccctggcatcttttagaaacgaattcctttctctccatacataaatgcctgcagagtcccatttcagaatccggcagacaaagccaccaatgtgatccccatgaccttataaacattcattaaaatgcatttcaaggcatgtgatggcctccccaccccctagataatgagaaaacaaaggtttctcttctgatagagacaagttcagctctgaagtcaacattatttctggttctgtctgaacaatgacatatggcaactcttccctttctatagttctagtccagaatgacaaaaaaggggaaaaatttcttagagaaggtagagattatacgaatacagtccatgaaatgagcataaggagaataaagaatataacttatccaaagaagtctggcaggctgttataaatgcttgattttggacactgtagttggaggtttaacatggacaccaataaaaaggtcagcaaagggtatgcactgttcctattgggcaagaagataggaggtcaaaggtaaccaggaaagataaactcagggagacttattttccctccagagggcactgggcttgtaggccctgggcaaaattgtcaaaaaggtgaaaatcgcctgtggtttatttagtctgctctttcttcactagtgcctcaccagttcagttcaggccaatttgctagctggctccttcgttaattaaggatccgagggcctatttcccatgattccttcatatttgcatatacgatacaaggctgttagagagataattagaattaatttgactgtaaacacaaagatattagtacaaaatacgtgacgtagaaagtaataatttcttgggtagtttgcagttttaaaattatgttttaaaatggactatcatatgcttaccgtaacttgaaagtatttcgatttcttggctttatatatcttgtggaaaggacgaaacaccgcaaggctattggtcaaggcagttttagagctagaaatagcaagttaaaataaggctagtccgttatcaacttgaaaaagtggcaccgagtcggtgctttttttccgcggtgggcgcgccggatcctaatcgatttgagtaattcatacaaaaggactcgcccctgccttggggaatcccagggaccgtcgttaaactcccactaacgtagaacccagagatcgctgcgttcccgccccctcacccgcccgctctcgtcatcactgaggtggagaagagcatgcgtgaggctccggtgcccgtcagtgggcagagcgcacatcgcccacagtccccgagaagttggggggaggggtcggcaattgaaccggtgcctagagaaggtggcgcggggtaaactgggaaagtgatgtcgtgtactggctccgcctttttcccgagggtgggggagaaccgtatataagtgcagtagtcgccgtgaacgttctttttcgcaacgggtttgccgccagaacacaggtaagtgccgtgtgtggttcccgcgggcctggcctctttacgggttatggcccttgcgtgccttgaattacttccacgcccctggctgcagtacgtgattcttgatcccgagcttcgggttggaagtgggtgggagagttcgaggccttgcgcttaaggagccccttcgcctcgtgcttgagttgaggcctggcctgggcgctggggccgccgcgtgcgaatctggtggcaccttcgcgcctgtctcgctgctttcgataagtctctagccatttaaaatttttgatgacctgctgcgacgctttttttctggcaagatagtcttgtaaatgcgggccaagatctgcacactggtatttcggtttttggggccgcgggcggcgacggggcccgtgcgtcccagcgcacatgttcggcgaggcggggcctgcgagcgcggccaccgagaatcggacgggggtagtctcaagctcgccggcctgctctggtgcctggcctcgcgccgccgtgtatcgccccgccctgggcggcaaggctggcccggtcggcaccagttgcgtgagcggaaagatggccgcttcccggccctgctgcagggagctcaaaatggaggacgcggcgctcgggagagcgggcgggtgagtcacccacacaaaggaaaagggcctttccgtcctcagccgtcgcttcatgtgactccacggagtaccgggcgccgtccaggcacctcgattagttctcgagcttttggagtacgtcgtctttaggttggggggaggggttttatgcgatggagtttccccacactgagtgggtggagactgaagttaggccagcttggcacttgatgtaattctccttggaatttgccctttttgagtttggatcttggttcattctcaagcctcagacagtggttcaaagtttttttcttccatttcaggtgtcgtgagctagtaatcgatcctagggccaccatgtacccatacgatgttccagattacgcttcgccgaagaaaaagcgcaaggtcgaagcgtccgacaagaagtacagcatcggcctggacatcggcaccaactctgtgggctgggccgtgatcaccgacgagtacaaggtgcccagcaagaaattcaaggtgctgggcaacaccgaccggcacagcatcaagaagaacctgatcggagccctgctgttcgacagcggcgaaacagccgaggccacccggctgaagagaaccgccagaagaagatacaccagacggaagaaccggatctgctatctgcaagagatcttcagcaacgagatggccaaggtggacgacagcttcttccacagactggaagagtccttcctggtggaagaggataagaagcacgagcggcaccccatcttcggcaacatcgtggacgaggtggcctaccacgagaagtaccccaccatctaccacctgagaaagaaactggtggacagcaccgacaaggccgacctgcggctgatctatctggccctggcccacatgatcaagttccggggccacttcctgatcgagggcgacctgaaccccgacaacagcgacgtggacaagctgttcatccagctggtgcagacctacaaccagctgttcgaggaaaaccccatcaacgccagcggcgtggacgccaaggccatcctgtctgccagactgagcaagagcagacggctggaaaatctgatcgcccagctgcccggcgagaagaagaatggcctgttcggcaacctgattgccctgagcctgggcctgacccccaacttcaagagcaacttcgacctggccgaggatgccaaactgcagctgagcaaggacacctacgacgacgacctggacaacctgctggcccagatcggcgaccagtacgccgacctgtttctggccgccaagaacctgtccgacgccatcctgctgagcgacatcctgagagtgaacaccgagatcaccaaggcccccctgagcgcctctatgatcaagagatacgacgagcaccaccaggacctgaccctgctgaaagctctcgtgcggcagcagctgcctgagaagtacaaagagattttcttcgaccagagcaagaacggctacgccggctacattgacggcggagccagccaggaagagttctacaagttcatcaagcccatcctggaaaagatggacggcaccgaggaactgctcgtgaagctgaacagagaggacctgctgcggaagcagcggaccttcgacaacggcagcatcccccaccagatccacctgggagagctgcacgccattctgcggcggcaggaagatttttacccattcctgaaggacaaccgggaaaagatcgagaagatcctgaccttccgcatcccctactacgtgggccctctggccaggggaaacagcagattcgcctggatgaccagaaagagcgaggaaaccatcaccccctggaacttcgaggaagtggtggacaagggcgcttccgcccagagcttcatcgagcggatgaccaacttcgataagaacctgcccaacgagaaggtgctgcccaagcacagcctgctgtacgagtacttcaccgtgtataacgagctgaccaaagtgaaatacgtgaccgagggaatgagaaagcccgccttcctgagcggcgagcagaaaaaggccatcgtggacctgctgttcaagaccaaccggaaagtgaccgtgaagcagctgaaagaggactacttcaagaaaatcgagtgcttcgactccgtggaaatctccggcgtggaagatcggttcaacgcctccctgggcacataccacgatctgctgaaaattatcaaggacaaggacttcctggacaatgaggaaaacgaggacattctggaagatatcgtgctgaccctgacactgtttgaggacagagagatgatcgaggaacggctgaaaacctatgcccacctgttcgacgacaaagtgatgaagcagctgaagcggcggagatacaccggctggggcaggctgagccggaagctgatcaacggcatccgggacaagcagtccggcaagacaatcctggatttcctgaagtccgacggcttcgccaacagaaacttcatgcagctgatccacgacgacagcctgacctttaaagaggacatccagaaagcccaggtgtccggccagggcgatagcctgcacgagcacattgccaatctggccggcagccccgccattaagaagggcatcctgcagacagtgaaggtggtggacgagctcgtgaaagtgatgggccggcacaagcccgagaacatcgtgatcgaaatggccagagagaaccagaccacccagaagggacagaagaacagccgcgagagaatgaagcggatcgaagagggcatcaaagagctgggcagccagatcctgaaagaacaccccgtggaaaacacccagctgcagaacgagaagctgtacctgtactacctgcagaatgggcgggatatgtacgtggaccaggaactggacatcaaccggctgtccgactacgatgtggaccatatcgtgcctcagagctttctgaaggacgactccatcgacaacaaggtgctgaccagaagcgacaagaaccggggcaagagcgacaacgtgccctccgaagaggtcgtgaagaagatgaagaactactggcggcagctgctgaacgccaagctgattacccagagaaagttcgacaatctgaccaaggccgagagaggcggcctgagcgaactggataaggccggcttcatcaagagacagctggtggaaacccggcagatcacaaagcacgtggcacagatcctggactcccggatgaacactaagtacgacgagaatgacaagctgatccgggaagtgaaagtgatcaccctgaagtccaagctggtgtccgatttccggaaggatttccagttttacaaagtgcgcgagatcaacaactaccaccacgcccacgacgcctacctgaacgccgtcgtgggaaccgccctgatcaaaaagtaccctaagctggaaagcgagttcgtgtacggcgactacaaggtgtacgacgtgcggaagatgatcgccaagagcgagcaggaaatcggcaaggctaccgccaagtacttcttctacagcaacatcatgaactttttcaagaccgagattaccctggccaacggcgagatccggaagcggcctctgatcgagacaaacggcgaaaccggggagatcgtgtgggataagggccgggattttgccaccgtgcggaaagtgctgagcatgccccaagtgaatatcgtgaaaaagaccgaggtgcagacaggcggcttcagcaaagagtctatcctgcccaagaggaacagcgataagctgatcgccagaaagaaggactgggaccctaagaagtacggcggcttcgacagccccaccgtggcctattctgtgctggtggtggccaaagtggaaaagggcaagtccaagaaactgaagagtgtgaaagagctgctggggatcaccatcatggaaagaagcagcttcgagaagaatcccatcgactttctggaagccaagggctacaaagaagtgaaaaaggacctgatcatcaagctgcctaagtactccctgttcgagctggaaaacggccggaagagaatgctggcctctgccggcgaactgcagaagggaaacgaactggccctgccctccaaatatgtgaacttcctgtacctggccagccactatgagaagctgaagggctcccccgaggataatgagcagaaacagctgtttgtggaacagcacaagcactacctggacgagatcatcgagcagatcagcgagttctccaagagagtgatcctggccgacgctaatctggacaaagtgctgtccgcctacaacaagcaccgggataagcccatcagagagcaggccgagaatatcatccacctgtttaccctgaccaatctgggagcccctgccgccttcaagtactttgacaccaccatcgaccggaagaggtacaccagcaccaaagaggtgctggacgccaccctgatccaccagagcatcaccggcctgtacgagacacggatcgacctgtctcagctgggaggcgacagccccaagaagaagagaaaggtggaggccagctaagaattcaataaaagatctttattttcattagatctgtgtgttggttttttgtgtgcggccgcccccgggcgatacatggttagatcaagcacaatgaaacatggttagatcaagcacaatgaaacatggttagatcaagcacaatgaaacatggttagatcaagcacaacgatagtgaattctaccagtgccataagtagtgaattctaccagtgccataagtagtgaattctaccagtgccataagtagtgaattctaccagtgccataatcctagggcggccgccaccccaccagtgcaggctgcctatcagaaagtggtggctggtgtggctaatgccctggcccacaagtatcactaagctcgctttcttgctgtccaatttctattaaaggttcctttgttccctaagtccaactactaaactgggggatattatgaagggccttgagcatctggattctgcctaataaaaaacatttattttcattgcaatgatgtatttaaattatttctgaatattttactaaaaagggaatgtgggaggtcagtgcatttaaaacataaagaaatgaagagctagttcaaaccttgggaaaatacactatatcttaaactccatgaaagaaggtgaggctgcaaacagctaatgcacattggcaacagcccctgatgcctatgccttattcatccctcagaaaaggattcaagtagaggcttgatttggaggttaaagttttgctatgctgtattttacattacttattgttttagctgtcctcatgaatgtcttttcactacccatttgcttatcctgcatctctcagccttgactccactcagttctcttgcttagagataccacctttcccctgaagtgttccttccatgttttacggcgagatggtttctcctcgcctggccactcagccttagttgtctctgttgtcttatagaggtctacttgaagaaggaaaaacagggggcatggtttgactgtcctgtgagcccttcttccctgcctcccccactcacagtgacccggaatctgcagtgctagtctcccggaactatcactctttcacagtctgctttggaaggactgggcttagtatgaaaagttaggactgagaagaatttgaaagggggctttttgtagcttgatattcactactgtcttattaccctatcataggcccaccccaaatggaagtcccattcttcctcaggatgtttaagattagcattcaggaagagatcagaggtctgctggctcccttatcatgtcccttatggtgcttctggctctgcagttattagcatagtgttaccatcaaccaccttaacttcatttttcttattcaatacctagaaagcttcagacatgataagatacattgatgagtttggacaaaccacaactagaatgcagtgaaaaaaatgctttatttgtgaaatttgtgatgctattgctttatttgtaaccattataagctgcaataaacaagttaacaacaacaattgcattcattttatgtttcaggttcagggggaggtgtgggaggttttttaaagcaagtaaaacctctacaaatgtggtacccgggaagctgaaggcagataatgaccaggacaggtcaacctctcttcttctgaaagccttcatctactaatggcctgggactcttcccttaaatgcttagattgtgtcttccactaaggttttttgctgttgctgttgtttgtttgtttgtttgtttgtttgtttgttttgagacggaatctcactctgtcgcccaggctggagtgtagtggcacaatctcagctcaccacaaccttcacctcctaggttgaagggattctcctgcctcagcctcctgagtagctaggattacaggcacatgccaccatgcctggctaatttttgtatttttagtagagacaggatttcgccatgttggccaggctggtcttgaactcctgacctcaggtgatctgcctaccttggtctcccaaagtgctgggattactggtgtgagccaccacacccggccaaggtttttgtttgtttgtttgtttgtttgttttgtattgaggcagggtatcactctggtcacccaggctggagtgcagtagtgcaatcacggctcactgaaacctccacctccctggcgggctcaggtgatcctgccacctcagcttcccaggtagctgggactacaggcttgtaccaccactcccagctaatttttgcgtttttagtagagacagggtttccccatgttgcccaggttggtctcaaactctgggctcaagcgatctgcctgcctcagcctcccaaagtgctgggattacaggtgtaagccaccgtacccggccccgccactaaggttttgaaaatgaagcaattacaagtttaagtctattaataagtgatgaagctatgtagaaaagcagaataattatcttggatcaggaaggtcacatgaggatctacttgggggttgtcaatattctatttcttgacctgatcagtgttgacagcaggttttaattttttacttctttttgtttgtttgtttttgagacggagtcttgctctgtctcccaggctggagtgcagtggtatgatctcggctcactgcaacctccgcctcctgggttcaagctgttctcctgcctcagcctccccagtagctgggattacaggcaggcaccaccacgaccagctaatttttgtatttttagtagagactgggtttcaccatcttggccaggctggtctcgaacttctgatctcgtgatccgccctccttggcctcccaaagtgctgggattacaggcttgagccagcgtgcccggcccattttttacttccttattaaactgtacatataggccttgcacacttttctgcatcaatgttatattccacaataaagggaaaaggtatatacacaacttgataccagtaatgtgaaacatatatttctacatagaaaaaaaaatgactgaaatactgcactccaatgtgttcacacagtagttgtttctggattatttatatattaaatgtttatatattgtattatgccatgaggtttgtgttttctctccacttttctgcattttccaagtttactacaaagagcacatattactcttataatcagaaagtcataaaatatatttaaaaagacaaaattgaaactaataaggatcaacacaaaacagatgagccatctgtggaaatccgcacagaatactacctaaagagattggtgacgtgcatgatctcactaggatgagcacaaagcttgccagagcctagggtctatttctagggttggctcttggaagccaggatagttgttatctctgggaagagggaggggcacacaaggggcttctaaaacattctgaatgttctatttctgaacctggttggtgggtacatgactgttggttttattattatatgttttatatactcttccgtatgtatggtgtggattccaaaaaaagatttcctttagagaaaaccagaatcacataagtagaaaatatggtgctatgttgaaggaacaactcaagtttatataaaatcatcatcatttataggcttaaaaagttgctttggaattttggtctaactgacttgtcttttctgcagcaaaccacgctccttctggacgtgctccaggcagaggggattagggtgggttcaaggctgcaagtacctagctcagcacactctcttcaggggacttagagtttgtctggtgttggctctctgagctcttgtcaggaatgccgacccttccgaggttcaggatttgaagcctgccttcccaccccagatttggtccacacagacactcaagtatgtatttcaactacaaatgacctgtactttcctattactcctctctttcatggtaacctttctggtatccttccttccctacatttatgggagggggacatcattctctgctctcctgtcactgaaggctccaccttctgtcttcttctgacccatctggttttcctggggccacctcctctccttaccaccctaacgcttttgtaacttgaggagaaatgagagatcacctagtcaggtcatcattctctgtagatgaagaggcccaatggtttgctcaagaattgccaagcgagttaaagacagagagtatgagagtcagcaagacctacagaaagcatctatctgcactgttttgcagggacttagcctttgtgtgtggactcctggaatgccacccactaagaaacattgtctgacaccaactccccacttggtaggtggggacactgaaactcatggcaggaaagggccttgccccaagccagggcagagtgtcactcatcactctcaattttcagtccagggcaccttgttgtgactatcccaaaggcagccactttccctggtctgaaagacctgaagagagaagagaagagaaggatggaaggcagagtatgcggctttgattcatttcctggtgaaaacagatctatacgagaagcaaatttcacgaaagggaagagaagaaagtgtcccatacgttgctggcctgtttcaaccttgctttgattcttgctgaaaagggtaccgtgtatttctgagttcaacatgcagaccagtgttaggaaagccactgcacctccactttagcctccagggctgtgccctgcaaatggcctgcagccttggtgcctcgctctccagactgcattttggaagatgggacagaggcttatggaagcccacattagaacgggggagcagaatgggtgagatgagggatccttgatagtgaaccagatgaaggaatggtagccaaatgccaggcctcctttgtggcttcaatccaaaggctctggagcccttccagggcagaacatcaggcatgtttacccccactgtcctcaacagtgacagaggtgcaatcttgggcagctggccattttgaaagcaacctccttaatctcaactgggaaggctccctagcaggacccctgtgttgcacacctggaggaagctagactaaccagaagctcagcacggttccatctgggatgcccaggtctgagacgaaaaaggtaactctcttttctgggtcctggcccagttgtgtctctctccacctcattctctgagatgcctgtctccccttttttgtcccatcaggaggcaagagctatcactgggccagactccaccagaagccaagccagcttgttacccagcttctcagggagcaaagaacagccttgtttctatcttatccccactgtcccctgcccctgccccacctcccagccattcagcttctggcttccccagagctgcctgcttctttgtggtcctccattccttgaaaagaccttctagtcattagtgtatataaatggccacttagcccagattacagtgaggtcaacagctggggctctgagaattgtcacacactggcacaggagaggaggctattcttccagagaatttggagggcactcccatccacttacaacaaaaagcccatccactgtgcttggcagtaggtgatctgagaaccaatggaaccaggttaatcctgtggcactgttgagtgaggagagcagtggcgggcactggaaaatatcagagacaaggcaggagacctgaaatctaggcttagctcctcatatacttggcagctgtatgacctcagacaaccagtgttacctctctaagcctcagtttcctcatgcaaaaggagggggaataacaacagagcccactgcttgggggtgttgtgaggacaggatgaaaaaacaaacagaaatccctcagtacaggattcagtgcagtggacagtcttgcaaggtctggttcagccctccacccctaccctcaccagtataaagaactctggcctacaagtcagatgacctgagttttaatctcagctttgccattagccgtgtgaacttgagaaagtccctttcctttttacatctattgggatgatcatgcattttttgtcctttattctgttaatatagtgtgttacattgattgcttttcatagactgaaccagccttgtattccagggataaatctcacttggtcatggtgtataatcctttatacaaatgttgctgggttgagtttgctagtattttgttgaagatttttatgtcttgattcataaggaatattggtgtaccttccccttttatggccacagtttccctacaatgatgtagtcgaactagacaacctccaatatctttcagtattcatgtcctctgattctgtgaaactaagaaaattaagaaatagtgattcataggcacaaggcaggcaaaacttagactccttgtagaataattaggaagccaaatattcagtgtgcttatttctcaaataaccttagtttctccagtctgccccaactccgaggcctgaatatctctagatgcttatgatggcaactaaagcctaaaagctaattcattttaaagttcttccaaatgcatagggttttatttttccagacctgggttcagatggggaatttgacaaacaatggaaagggggaaaaacaacaatctaaacactgagtgacaaagtaacaaagaaatagtctagctatcagccagtcaagccagccttggctttgctatccaaagtagtcagtctaattctaccaccagtttctgttcctgtagctgtctactgcctgccagggactctgccttcccacccacaactaccaatggaaggatgtggtgaccataccagtggctgctgacatctcctgccatgggaagcataattgcctccagcagcctcccccttagatccatcatttttgttgcacttggcctgggctgtactcccggccaatgactgaacatggtgagcatagtaatgcaggcccatttctgtgaggagcaggactcctccagtaggtgactttggctcaaggactctctattggcctggttgaacttttcctgaactgtgctactgtctgagactcttcttacccaatcctctttctcgccccaattgtcacagaccacctgcattgtggtctgagtctctccccaccttctcttgctcttccctgtttatctttcacaggcatttcccccagtacattccttgaatgtctaacccgatacgggtgcctgacttttggcagacctaagcagacaaaaaggagtacttggttacctagctcttctttctaccacaaacatcgagggaaccctttttccctcacccctctgccacacccccactgccccagtgaacaaccacagagagagctgtggtataatattaggctggtgcaaaagtaattgcggtttttgccattacttttaatggtaaaaaccgcaattacttttgcacctacctagtatttgtgtccccccaaattcatatgttgaaacctaacccacaatatgatgtcattaggaggcaagaccttgaggaggtgattagatgatggggtggagctctcctgaatgagattagtgcccttataagaagaagcccaaggaagctaccttgactcttccatcacatgagaatgcagcaagaaggcaccatctactaatcaggaagagagctctcaccagacactgaatctgccagtgtcttgatcttgaagttcccagcctccagaactatgcataatgcatttccattgtctctaagccacccagcctatggtattttgtcatagcagcctgaactgactaagacagtgagccacatgagaagtgccccaacccctcccttaagcacttggctcacagatcagtgggttcatttctgcctgagttttattgttattctgtagatttcttgggctagatatatttttctgttattttccttcttcacctcagtcatgaattggttgttttaaaaaagacaatgtaagtcatggggaaactcctgacaactctactctcctagggttcctgataaaaggggattcagttgagtcctctgatggtctctacctgccaaagtccagcagcccttagcaaacatgctgctcgtttctgtagagaaggtgctggtgtcccaccatacttctctctccctcatgaagggcttgcgacccagcaaatgggtggcttatatgggtctgtttcaaaggaagagccagctctgggaagaaaaacgatgagcataagcataacctaccactgtgcctgggaaagcagacaacttttttgatgtgtgaatatctaatgagaatggaatccatcaattaccttaaacttaggcacagtcttcaaattcaatatatgtgggatatacttttagtcagtttgtagacgttatttgtaataaataatctggcttctctaaagaaattattttaagtgtttggtttggtttgatttaatggtaaaattatatttagtggcagagaattatagcaatggtgataaactatagagtgtcataagttcatatcttattctcacatttgaagctgcctgcagatgcattcaagatgcagccagaagtcaggagactcaggctgttatttggagctcatcattttacagccttgctggactcccactttctcaggggaaaaatgtggtgttgacccagattagctctccaggccctgctgagttgggcactctgtaagctggagggtcttctattgtcttcacctaagtgtcaatcaacaacccaaatgggcatgggggaagagggagctgggccaatgcccagggtgcctggtagagagataccttgggcactggaaggcaccagcttcccagagagaagggggagggccatgaaaaagttggctgtagatgccagggacactgggactctccagctgtgtgtttgtgtcttctgaagacttatgtttcattcctttggagcatgcataatcatacactgtgggatgtgttatatagattgcttgatagttcaccactgtaataaaatactgtgactggaatctgctcccagtctgcctttgatagcacttgtgcaacacacatttactgagcatttacagtgatccaggacctgtgttgtgaaaacattgatggacaaggcagatggtggagcacgtcagtgaggatttttaacaaaggctggtaagtgctataaaggaacattgtaggacactagagaacaaagaacaggagaacctgacttaggctggggtggggcgttggttagaggaggctccttggaggacatgaggtttaagctgtgacctgaggatgaatagatgttggccaggtgaggttaattaagcttgtcagccttaccagtaaaaaagaaaacctattaaaaaaacaccactcgacacggcaccagctcaatcagtcacagtgtaaaaaagggccaagtgcagagcgagtatatataggactaaaaaatgacgtaacggttaaagtccacaaaaaacacccagaaaaccgcacgcgaacctacgcccagaaacgaaagccaaaaaacccacaacttcctcaaatcgtcacttccgttttcccacgttacgtaacttcccattttaagaaaactacaattcccaacacatacaagttactccgccctaaaacctacgtcacccgccccgttcccacgccccgcgccacgtcacaaactccaccccctcattatcatattggcttcaatccaaaataaggtatattattgatgatgtttaaactacggcccggtacccagcttttgttccctttagtgagggttaattgcgcgcttggcgtaatcatggtcatagctgtttcctgtgtgaaattgttatccgctcacaattccacacaacatacgagccggaagcataaagtgtaaagcctggggtgcctaatgagtgagctaactcacattaattgcgttgcgctcactgcccgctttccagtcgggaaacctgtcgtgccagctgcattaatgaatcggccaacgcgcggggagaggcggtttgcgtattgggcgctcttccgcttcctcgctcactgactcgctgcgctcggtcgttcggctgcggcgagcggtatcagctcactcaaaggcggtaatacggttatccacagaatcaggggataacgcaggaaagaacatgtgagcaaaaggccagcaaaaggccaggaaccgtaaaaaggccgcgttgctggcgtttttccataggctccgcccccctgacgagcatcacaaaaatcgacgctcaagtcagaggtggcgaaacccgacaggactataaagataccaggcgtttccccctggaagctccctcgtgcgctctcctgttccgaccctgccgcttaccggatacctgtccgcctttctcccttcgggaagcgtggcgctttctcatagctcacgctgtaggtatctcagttcggtgtaggtcgttcgctccaagctgggctgtgtgcacgaaccccccgttcagcccgaccgctgcgccttatccggtaactatcgtcttgagtccaacccggtaagacacgacttatcgccactggcagcagccactggtaacaggattagcagagcgaggtatgtaggcggtgctacagagttcttgaagtggtggcctaactacggctacactagaaggacagtatttggtatctgcgctctgctgaagccagttaccttcggaaaaagagttggtagctcttgatccggcaaacaaaccaccgctggtagcggtggtttttttgtttgcaagcagcagattacgcgcagaaaaaaaggatctcaagaagatcctttgatcttttctacggggtctgacgctcagtggaacgaaaactcacgttaagggattttggtcatgagattatcaaaaaggatcttcacctagatccttttaaattaaaaatgaagttttaaatcaatctaaagtatatatgagtaaacttggtctgacagttaccaatgcttaatcagtgaggcacctatctcagcgatctgtctatttcgttcatccatagttgcctgactccccgtcgtgtagataactacgatacgggagggcttaccatctggccccagtgctgcaatgataccgcgagacccacgctcaccggctccagatttatcagcaataaaccagccagccggaagggccgagcgcagaagtggtcctgcaactttatccgcctccatccagtctattaattgttgccgggaagctagagtaagtagttcgccagttaatagtttgcgcaacgttgttgccattgctacaggcatcgtggtgtcacgctcgtcgtttggtatggcttcattcagctccggttcccaacgatcaaggcgagttacatgatcccccatgttgtgcaaaaaagcggttagctccttcggtcctccgatcgttgtcagaagtaagttggccgcagtgttatcactcatggttatggcagcactgcataattctcttactgtcatgccatccgtaagatgcttttctgtgactggtgagtactcaaccaagtcattctgagaatagtgtatgcggcgaccgagttgctcttgcccggcgtcaatacgggataataccgcgccacatagcagaactttaaaagtgctcatcattggaaaacgttcttcggggcgaaaactctcaaggatcttaccgctgttgagatccagttcgatgtaacccactcgtgcacccaactgatcttcagcatcttttactttcaccagcgtttctgggtgagcaaaaacaggaaggcaaaatgccgcaaaaaagggaataagggcgacacggaaatgttgaatactcatactcttcctttttcaatattattgaagcatttatcagggttattgtctcatgagcggatacatatttgaatgtatttagaaaaataaacaaataggggttccgcgcacatttccccgaaaagtgccacctgacgcgccctgtagcggcgcattaagcgcggcgggtgtggtggttacgcgcagcgtgaccgctacacttgccagcgccctagcgcccgctcctttcgctttcttcccttcctttctcgccacgttcgccggctttccccgtcaagctctaaatcgggggctccctttagggttccgatttagtgctttacggcacctcgaccccaaaaaacttgattagggtgatggttcacgtagtgggccatcgccctgatagacggtttttcgccctttgacgttggagtccacgttctttaatagtggactcttgttccaaactggaacaacactcaaccctatctcggtctattcttttgatttataagggattttgccgatttcggcctattggttaaaaaatgagctgatttaacaaaaatttaacgcgaattttaacaaaatattaacgcttacaatttccattcgccattcaggctgcgcaactgttgggaagggcgatcggtgcgggcctcttcgctattacgccagctggcgaaagggggatgtgctgcaaggcgattaagttgggtaacgccagggttttcccagtcacgacgttgtaaaacgacggccagtgagcgcgcgtaatacgactcactatagggcgaattggagctccactacgtagtttaaacatcatcaataatataccttattttggattgaagccaatatgataatgagggggtggagtttgtgacgtggcgcggggcgtgggaacggggcgggtgacgtagtagtgtggcggaagtgtgatgttgcaagtgtggcggaacacatgtaagcgacggatgtggcaaaagtgacgtttttggtgtgcgccggtgtacacaggaagtgacaattttcgcgcggttttaggcggatgttgtagtaaatttgggcgtaaccgagtaagatttggccattttcgcgggaaaactgaataagaggaagtgaaatctgaataattttgtgttactcatagcgcgtaatatttgtctagggccgcggggactttgaccgtttacgtggagactcgcccaggtgtttttctcaggtgttttccgcgttccgggtcaaagttggcgttttgattc

SEQ ID NO: 63 - DNA, 30655 bp, Artificial Sequence
  LCR globin vector (Sleeping beauty IR, Beta promoter, human gamma globin, mgmt, Ef1a promoter and Ad5)
catcatcaataatataccttattttggattgaagccaatatgataatgagggggtggagtttgtgacgtggcgcggggcgtgggaacggggcgggtgacgtagtagtgtggcggaagtgtgatgttgcaagtgtggcggaacacatgtaagcgacggatgtggcaaaagtgacgtttttggtgtgcgccggtgtacacaggaagtgacaattttcgcgcggttttaggcggatgttgtagtaaatttgggcgtaaccgagtaagatttggccattttcgcgggaaaactgaataagaggaagtgaaatctgaataattttgtgttactcatagcgcgtaatatttgtctagggccgcggggactttgaccgtttacgtggagactcgcccaggtgtttttctcaggtgttttccgcgttccgggtcaaagttggcgttttgattcggccgaaggattacatgagcttagaaatgtaattagcatagtgtgtggcatagtgtagataccaaataaatatgatctctccttctactcttgaaaatgcaaacacattcttggtggtcctaaaatagcctgtaacatggtttactcagcagcatttgctattcaaggcagatctgcctttagtcattggctgcgctcctgaacagctgtgtgaaaggctaacttttgtaaaccaaatcaaaataaaatgcagcaaaaatttgtcactgaaaggaaatcctcagtatatccttttatgaaatgaaagatccctcatccaaacttaacttttttaaaagtgcgcatttggagatatagccctttcttatgaatcctaattcaattttggccataaacacacgttgatgttccccaccccaaagcacatagcaacaagagtaggttctatattgaaaataatgacaatttaaaaacatgtacttatttcactgtatgtggacagtgtctatgattgcatcatgaagtgtcatataaccatgtacgtgtacatgagagagagatagagagagaagtggtagggtggtggtggtagaggggatggcgatagtaatcatggtaatggtagaggtgatggaggtggtaatgacggaggtaagggtggtagtgatgatggtggtggtggtaatggtggtggatgtggtggtggcaattgggatggtgggatggtggtagccatggtgatggtggtaatggtgttgatttaaagggtggtggtagtgaaggtgagggtagtggtggtggaggtggtggtgctggtagcaatagtgatggtggtgatggtgttgatgagggtgttgggatcagggtgagttcccacagtatatttcattcttgttgtaccactctgtcaacagcaccactgactgggacagaggaagaaggcacactctgaatgtgttattaacagaaacctcaaaacagtctgtctccttgtagtcattcaaaattatctttttcttacctggaaaactgaaactgaattaccgggaaaaacacaggagatttttgtttgttaatatgctgccaataaagtaattttatgtcaaatttaactacaggaaagggcaaggcattttctaagttccttagatgtcatgtggctaaaaaaaacaaaaggatggacagcagttagatactgtacacttagctgtttgaagccatatattcagaaagcagatgttgggagttggtgtttgaggactgatttcctggaggtattttatataggccaagttcattgttctaaactctaagggcttgacttgagggaggaaaagaggcaagaacatgtttagttttgctgacagcatcacatgggcagccctaaggctagacaactttagggcctgaagcttattctaggaaagaagcacctacagagtggcactgggctcccctccactatagagatgaagtcatatgacagtaaagggcaggcagggctgcctagggggcccattgaaattgcggccgcaaataatgggcccggagcaagagagagggaggcaatgacagcagagacatgcctgcgccttgggtttgagtgcccagtggtcaaatccacttccctgtggctgatgcttgcctttctaactttggaatttaggggttggagatctggtgagaaggtaggagggagatgaggaggagaagggaaaggcaggaaggaaggggagggaaaggaaaagcaaaaggggaggaggaaggtttccaacaaattattctatatcaactgcggaaatcaaaatttgttgcccaaatcttagaagctcatgtccctcctccccagaagtctggaatgcagcactccaggggtagcttataacccaaatatctatctgtaaaaagagaaacattgggctttcgagctgtggattctcagtaaaagcaagaggcctcagcctacacaggccagcccagagtttgaggaaccccaggcccacacccacagggctggcccctgggtctgcatactccctagaaatgtgcacacttctgagcctcaactctgtcctggagtctaacagcatccctctccttcctggggcagttccacctccagaaacctgttaccttgggccttatgtcaaggaaactgtgggaaagagctaggcaggaatgcagatgaggccagcatgggctcctaaaagtttagaaataggcagtgtcatgctcccaggtgcctgcataaaccagctgaaaaatggagctcccctcaccagcactctcccttcaaacagactgtgatttgcaggtcactggtttaccaagccaggctacccaggcaggacccagatgccaagcccagtggtgtcctgcaagctgagcagtgctcagttcttgcaaaaaaaggtctgtgtgaaggcaaggcctctgcctggcttctcaccccagttgggtgtctggaacaggaaggagcccttactgcagaaaaaggaggagggagcaaagggagcgaacagctgcgtgctccatggggaggatccccaaagtagaaaggcgcatacacactgcagcccttgacccagaatgctcacagctacattacagattcaggtctcctcagtgtagtggggctgctgatgagactgtggcatcctcaggggtcaggacacacattttccatcactcttctgatggcaaaaaacctctgagccaatgccaacctctgatcattaaaaaaaagtgctcacagcagtgtgtggtttaggatcatgccctgtgtggtttggaacacgtgcacaaccacaccttgttcatcaccatcccagaaaccctgacgcaggcaaagagcagagttattaaccctactttactgatgtggatactgaggcccagaggctcatgcaagttatcaataagtggcagggacagttgcctctagattaactagcccctaggatcacctgggtcttggaaggggacccataaacatgagctcccctctcttggggccagatttgcacctgtgccgcgccttcagcctgcatgaagtaggggctgctggcaaagactcaaagctgtaaatctgggttttctcttgaggcttctaagggagctgtttcgacaactcactctgttcccagctggctgcccctgcatagggttttaaagcagcctagctttctgccaggcttggcagtggacaacgctggtcagaacatcccagagagctaccagaatgaagtaagtttgcttctactctttacctgtttatgggctgtctctgccactggaatgaaaggcactgagaacagtgcctggcctgcagaaggccctggaaatacctgagctcctaatctgggaataggagtaggaagagctttggaggcagggcacctgagtttgagatctacaacttcctgcctgtgtgacattgggaaagtctccatcctttctgagcctcagtctccaccctggggaagtggaaatatcaatctctgtgacacagaagcaaatgagcgaatgtgcacaaagtaccttgcacaagagagacgctcaaacacttgcctccaggtttcaccgagaactacagagtaagatagatttgttcccagtggaggaagcctgggaataatttgcccctagactatgaattcctggggctcaagatcgagcacagggccaggcacacagaagggaccctggaaatgtggcaggaggccagagatagacaggcccttagagctcatacccatgccctctgacctcaagaagaaagaaacctgctcaaaatctcacaaagagcttgttccaaccctgaatcgagtctgaggactccttcctgagtccagcactttttctgcaagaagtatatgcctccaaagctgatgggcgcaaatcttgaaccccgtcacataaacacaaagggaggaggtgactagagctcctcctactggatatgtctaaggtcaccagtctaaagaaaagggatggatagaatgaggccagtatttttgcagccatccaaatgtccacatacgctgttacactgagggctcctctctcccccgtcttcagccctacttgcatttagaggtgagaaagatatgggctgaggggttgtttttcatcgtattgtagatggaaagcacactgcccttggggccatccaaatgtggaccttgatgtagcaccccaccttctggatggccatccttctgaaagtcactgaatttctcagactttattctctttatccataaagaaggagaataataataatccccccaccctgcccaaccactgactggttgggaagctcagaagaaatactgggcacggcatcccattgtaatctatagagtgagtcgcttcttaatattaaatggctgaacacagaagatgtgcaaaaagtactgtgtccccttcctcctccaactgaacatttcatgccctttgcaccctcattttgtctaggagctgccttatgaagggaataggtacctgctccgagctggaggaatctttgccacttatggtggggtatggactgagacagagatggcatgtgacatgcgcactgagtctcaactccatgcaggctctggagcactctcaaattggagtactaatgccttttaaattctcacactagcaatcctttgacctactgatctagggatctagggaaagaatcgtgatcttaacttcaaagggaaggacaaaatgttctgcctcctgttaaaactccatacactaagtgcagagactggatgccttattaaccttgggtagatgcccaaatgttcaaaaggtcaaactcttctgttccccagatcgccagagtcattaaccagtcacactattaaatgaatgaacagatgctgaaaaggtacttgcattactgagatttcttatggtgatggcccctgcctgatatgtattcagcattttgtagttttcaatgtgcattagagtatagtggtgatgacattggcctctgagtttgccacttcttatatctgtgactttggtcaaattgcttaatctctctgagtctcggtttcctggagataataatagcttcttcttcccagggttatcatgaggattacaggagataatgccccaaaaatgcttagtaaagtgcctagcacctagtcaatgctgaattaaaggtggttattcttacttttcgttcatttgaactttgttctcagggagggcaaaggatagacaaagccccatagctagtgaggagtagctgcaagactagaacccaggtgttctgagccctagtcttaggccaagaacaactgttacgtgagatgcacgttttccttcaagggagctcacaattatttccatgtaaattcaaggactgctaaaagagaactctcctctgggactgataaacatctagtcgagtatcgacaaataggggttccgcgcacatttccccgaaaagtgccacctgacgtaactataacggtcctaaggtagcgaaagcttgcatgcctgcaggtcgactctagaggatcaaacctagccaccgcggtggcggccggctagccggctagccggctagccctagaactagtaacggccgccagtgtgctggaattcggcttgtaaggtaccggtgaagttcctatactttctagagaataggaacttcggaataggaacttctacctagatgcatgctcgagcggcccctacagttgaagtcggaagtttacatacacttaagttggagtcattaaaactcgtttttcaactactccacaaatttcttgttaacaaacaatagttttggcaagtcagttaggacatctactttgtgcatgacacaagtcatttttccaacaattgtttacagacagattatttcacttataattcactgtatcacaattccagtgggtcagaagtttacatacactaagttgactgtgcctttaaacagcttggaaaattccagaaaatgatgtcatggctttagaagcttctgatagactaattgacatcatttgagtcaattggaggtgtacctgtggatgtatttcaaggaattctgtggaatgtgtgtcagttagggtgtggaaagtccccaggctccccagcaggcagaagtatgcaaagcatgcatatcgatactagtttataagatctcgagctagcggccgtttgttaattaagtcgacggtaccgtcaaggctgcagtgagacatgatcttgccactgcactccagcctggacagcagagtgaaaccttgcctcacgaaacagaatacaaaaacaaacaaacaaaaaactgctccgcaatgcgcttccttgatgctctaccacataggtctgggtactttgtacacattatctcattgctgttcataattgttagattaattttgtaatattgatattattcctagaaagctgaggcctcaagatgataacttttattttctggacttgtaatagctttctcttgtattcaccatgttgtaactttcttagagtagtaacaatataaagttattgtgagtttttgcaaacacagcaaacacaacgacccatatagacattgatgtgaaattgtctattgtcaatttatgggaaaacaagtatgtactttttctactaagccattgaaacaggaataacagaacaagattgaaagaatacattttccgaaattacttgagtattatacaaagacaagcacgtggacctgggaggagggttattgtccatgactggtgtgtggagacaaatgcaggtttataatagatgggatggcatctagcgcaatgactttgccatcacttttagagagctcttggggaccccagtacacaagaggggacgcagggtatatgtagacatctcattctttttcttagtgtgagaataagaatagccatgacctgagtttatagacaatgagcccttttctctctcccactcagcagctatgagatggcttgccctgcctctctactaggctgactcactccaaggcccagcaatgggcagggctctgtcagggctttgatagcactatctgcagagccagggccgagaaggggtggactccagagactctccctcccattcccgagcagggtttgcttatttatgcatttaaatgatatatttattttaaaagaaataacaggagactgcccagccctggctgtgacatggaaactatgtagaatattttgggttccatttttttttccttctttcagttagaggaaaaggggctcaggatccacttgcccagtgttcttccttagttcctaccttcgaccttgatcctcctttatcttcctgaaccctgctgagatgatctatgtggggagaatggcttctttgagaaacatcttcttcgttagtggcctgcccctcattcccactttaatatccagaatcactataagaagaatataataagaggaataactcttattataggtaagggaaaattaagaggcatacgtgatgggatgagtaagagaggagagggaaggattaatggacgataaaatctactactatttgttgagaccttttatagtctaatcaattttgctattgttttccatcctcacgctaactccataaaaaaacactattattatctttattttgccatgacaagactgagctcagaagagtcaagcatttgcctaaggtcggacatgtcagaggcagtgccagacctatgtgagactctgcagctactgctcatgggccctgtgctgcactgatgaggaggatcagatggatggggcaatgaagcaaaggaatcattctgtggataaaggagacagccatgaagaagtctatgactgtaaatttgggagcaggagtctctaaggacttggatttcaaggaattttgactcagcaaacacaagaccctcacggtgactttgcgagctggtgtgccagatgtgtctatcagaggttccagggagggtggggtggggtcagggctggccaccagctatcagggcccagatgggttataggctggcaggctcagataggtggttaggtcaggttggtggtgctgggtggagtccatgactcccaggagccaggagagatagaccatgagtagagggcagacatgggaaaggtgggggaggcacagcatagcagcatttttcattctactactacatgggactgctcccctatacccccagctaggggcaagtgccttgactcctatgttttcaggatcatcatctataaagtaagagtaataattgtgtctatctcatagggttattatgaggatcaaaggagatgcacactctctggaccagtggcctaacagttcaggacagagctatgggcttcctatgtatgggtcagtggtctcaatgtagcaggcaagttccagaagatagcatcaaccactgttagagatatactgccagtctcagagcctgatgttaatttagcaatgggctgggaccctcctccagtagaaccttctaaccagctgctgcagtcaaagtcgaatgcagctggttagactttttttaatgaaagcttgcatgcagcactttgggaggctgaggtgggtggactgcttggagctcaggagttcaagaccatcttggacaacatggtgataccctgcctctacaaaaagtacaaaaattagcctggcatggtggtgtgcacctgtaatcccagctattagggtggctgaggcaggagaattgcttgaacccgggaggcggaggttgcagtgagctgagatcgtgccactgcactccagcctgggggacagagcacattataattaactgttattttttacttggactcttgtggggaataagatacatgttttattcttatttatgattcaagcactgaaaatagtgtttagcatccagcaggtgcttcaaaaccatttgctgaatgattactatactttttacaagctcagctccctctatcccttccagcatcctcatctctgattaaataagcttcagtttttccttagttcctgttacatttctgtgtgtctccattagtgacctcccatagtccaagcatgagcagttctggccaggcccctgtcggggtcagtgccccacccccgccttctggttctgtgtaaccttctaagcaaaccttctggctcaagcacagcaatgctgagtcatgatgagtcatgctgaggcttagggtgtgtgcccagatgttctcagcctagagtgatgactcctatctgggtccccagcaggatgcttacagggcagatggcaaaaaaaaggagaagctgaccacctgactaaaactccacctcaaacggcatcataaagaaaatggatgcctgagacagaatgtgacatattctagaatatattatttcctgaatatatatatatatatacacatataccatatgaaacacctctaggctataaggcaacagagctccttttttttttttctgtgctttcctggctgtccaaatctctaatgataagcatacttctattcaatgagaatattctgtaagattatagttaagaattgtgggagccattccgtctcttatagttaaatttgagcttcttttatgatcactgtttttttaatatgctttaagttctggggtacatgtgccatggtggtttgctgcacccatcaacccgtcatctacattaggtatttctcctaatgctatccttcccctagccccccacccccaacaggccccagtgtgtgatgttcccctccctgtgtccatggatcactggtttttttttgttttttttttttttttaaagtctcagttaaatttttggaatgtaatttattttcctggtatcctaaggacttgcaagttatctggtcactttagccctcacgttttgatgataatcacatatttgtaaacacaacacacacacacacacacacacacatatatatatatataaaacatatatatacataaacacacataacatatttatcgggcatttctgagcaactaatcatgcaggactctcaaacactaacctatagccttttctatgtatctacttgtgtagaaaccaagcgtggggactgagaaggcaatagcaggagcattctgactctcactgcctttagctaggcccctccctcatcacagctcagcatagtcctgagctcttatctatatccacacacagtttctgacgctgcccagctatcaccatcccaagtctaaagaaaaaaataatgggtttgcccatctctgttgattagaaaacaaaacaaaataaaataagcccctaagctcccagaaaacatgactaaaccagcaagaagaagaaaatacaataggtatatgaggagactggtgacactaagtgtctgaatgaggcttgagtacagaaaagaggctctagcagcatagtggtttagaggagatgtttctttccttcacagatgccttagcctcaataagcttgcggttgtggaagtttacttgtttatcaccggtgacgtccatgagcaaattaagaaaaacaacaacaaatgaatgcatatatatgtatatgtatgtgtgtatatatacacatatatatatatattttttttcttttcttaccagaaggttttaatccaaataaggagaagatatgcttagaactgaggtagagttttcatccattctgtcctgtaagtattttgcatattctggagacgcaggaagagatccatctacatatcccaaagctgaattatggtagacaaaactcttccacttttagtgcatcaatttcttatttgtgtaataagaaaattgggaaaacgatcttcaatatgcttaccaagctgtgattccaaatattacgtaaatacacttgcaaaggaggatgtttttagtagcaatttgtactgatggtatggggccaagagatatatcttagagggagggctgagggtttgaagtccaactcctaagccagtgccagaagagccaaggacaggtacggctgtcatcacttagacctcaccctgtggagccacaccctagggttggccaatctactcccaggagcagggagggcaggagccagggctgggcataaaagtcagggcagagccatctattgcttacatttgcttctgacacaactgtgttcactagcaacctcaaacagacaccatgggtcatttcacagaggaggacaaggctactatcacaagcctgtggggcaaggtgaatgtggaagatgctggaggagaaaccctgggaaggtaggctctggtgaccaggacaagggagggaaggaaggaccctgtgcctggcaaaagtccaggtcgcttctcaggatttgtggcaccttctgactgtcaaactgttcttgtcaatctcacaggctcctggttgtctacccatggacccagaggttctttgacagctttggcaacctgtcctctgcctctgccatcatgggcaaccccaaagtcaaggcacatggcaagaaggtgctgacttccttgggagatgccataaagcacctggatgatctcaagggcacctttgcccagctgagtgaactgcactgtgacaagctgcatgtggatcctgagaacttcaaggtgagtccaggagatgtttcagccctgttgcctttagtctcgaggcaacttagacaactgagtattgatctgagcacagcagggtgtgagctgtttgaagatactggggttgggggtgaagaaactgcagaggactaactgggctgagacccagtggtaatgttttagggcctaaggagcgcctctaaaaatctagatggacaattttgactttgagaaaagagaggtggaaatgaggaaaatgacttttattagattccagtagaaagaactttcatctttccctcatttttgttcgttttaaaacatctatctggaggcaggacaagtatggtcgttaaaaagatgcaggcagaaggcatatattggctcagtcaaagtggggaactttggtggccaaacatacattgctaaggctattcctatatcagctggacacatataaaatgctgctaatgcttcattacaaacttatatcctttaattccagatgggggcaaagtatgtccaggggtgaggaacaattgaaacatttgggctggagtagattttgaaagtcagctctgtgtgtgtgtgtgtgtgcgcgcgcgcgtgtgtgtgtgtgtgtgtcaacgtgtgtttcttttaacgtcttcagcctacaacatacagggttcatggtggcaagaagatagcaagatttaaattatggccagtgactagtgcttgaaggggaacaactacctgcatttaatgggaaggcaaaatctcaggctttgagggaagttaacataggcttgattctgggtagaagctgggtgtgtagttatctggaggccaggctggagctctcagctcactatgggttcatctttattgtctcctttcatctcaacagctcctgggaaatgtgctggtgaccgttttggcaatccatttcggcaaagaattcacccctgaggtgcaggcttcctggcagaagatggtgactgcagtggccagtgccctgtcctccagataccactgagcctcttgcccatgattcagagctttcaaggataggctttattctgcaagcaattcaaataataaatctattctgctgagagatcacacatgattttcttcagctcttttttttacatctttttaaatatatgagccacaaagggtttatattgagggaagtgtgtatgtgtatttctgcatgcctgtttgtgtttgtggtgtgtgcatgctcctcatttatttttatatgagatgtgcattttgttgagcaaataaaagcagtaaagacacttgtacacgggagttctgcaagtgggagtaaatggtgtaggagaaatccggtgggaagaaagacctctataggacaggacttctcagaaacagatgttttggaagagatgggaaaaggttcagtgaagacctgggggctggattgattgcagctgagtagcaaggatggttcttaatgaagggaaagtgttccaagctttaggaattcaaggtttagtcaggtgtagcaattctattttattaggaggaatactatttctaatggcacttagcttttcacagcccttgtggatgcctaagaaagtgaaattaatcccatgccctcaagtgtgcagattggtcacagcatttcaagggagagacctcattgtaagactctgggggaggtggggacttaggtgtaagaaatgaatcagcagaggctcacaagtcagcatgagcatgttatgtctgagaaacagaccagcactgtgagatcaaaatgtagtgggaagaatttgtacaacattaattggaaggcttacttaatggaatttttgtatagttggatgttagtgcatctctataagtaagagtttaatatgatggtgttacggacctaatgtttgtgtctcctcaaaattcacatgctgaatccccaactcccaactgaccttatctgtgggggaggcttttgaaaagtaattaggtttagatgagctcataagagcagatccccatcataaaattattttccttatcagaagcagagagacaagccatttctctttcctcccggtgaggacacagtgagaagtccgccatctgcaatccaggaagagaaccctgaccacgagtcagccttcagaaatgtgagaaaaaactctgttgttgaagccacccagtcttttgtattttgttatagcaccttgcactgagtaaggcagatgaagaaggagaaaaaaataagcttatcgaaacgcgtccccatcctcactgactccgtcctggagttggatgagagataatggccttacgttgtgccaggggagggtcgggctggatttagcaagatttaccttctccaaagagcggtgctgcagtggcacagctgcccacggaggtgggggggtcaccgtccctggaggtgatgaagaactgtggggatgtggcactgagggacatggccagtgggcacggtgggtgggttggggttggtcttggggatcttggagggcttttccagccttcatgatttgacgattgtatgaacatctacatggcaattctccagctgcctgtcccagtcctactgacccagctgtatctctccaggcaagctcttccaccccttctgcttgcatccagacaccatcaaacatgcaggctcagacacagggaccagcagtgtctgtggcctttttgtgctcctctccatgctgggttttaacttgctctttgtccttctatcctatcttcttatccttaaggctgttctgaacgctgtgacttggagagtgtcccagagccctcaacacctgcatgtcccacgtccatgctgtcctgcacttccttatccccaagatctgcctctccgtgatgcactgaattggcaaacatgtgtcaccccagaccaacaatgtcacagcaaactcccccttgataggacaagggggaatggctttacactgagacaggggaggtttgggttggatatgaggaggcagtttttcccccagagggtggtgacgcactgaacaggttgcccaaggaggctgtggatgccccatccctgcaggcattcaaggccaggctggatgtggctctgggcagcctgggctgctggttgatgaccctgcacatagcagggggttggatctggatgagcactgtgctcctttgcaacccaggccgttctatgattctgtcattctaaatctctctttcagcctaaagctttttccccgtatccccccaggtgtctgcaggctcaaagagcagcgagaagcgttcagaggaaagcgatcccgtgccaccttccccgtgcccgggctgtccccgcacgctgccggctcggggatgcggggggagcgccggaccggagcggagccccgggcggctcgctgctgccccctagcgggggagggacgtaattacatccctgggggctttgggggggggctgtccctatcgattactagttttaccacatttgtagaggttttacttgctttaaaaaacctcccacacctccccctgaacctgaaacataaaatgaatgcaattgttgttgttaacttgtttattgcagcttataatggttacaaataaagcaatagcatcacaaatttcacaaataaagcatttttttcactgcattctagttgtggtttgtccaaactcatcaatgtatcttatcatgtctgctcgaagagcggccgcttcagtttcggccagcaggcggggagcccgaggtagctcccgctcccttgagccaggcccctgccagacctgagctccctcccaagcctggcttccccaaccggtggccttcatgggccagaagccattccttcacggctagccctccggagtagttgcccacggctccgctgctgcagaccactctgtggcacgggatgaggatcttgacaggattgcctctcatggcgcctcccactgctcgcgcggctttggggttgccggccagggcggccaattgctggtaagaaatcacttctccgaatttcacaaccttaagcagcttccataacacctgacgcgtgaacgactcttgctggaaaacgggatggtgaagcgctggcacggggaactcttcgatagcctcgggctggtggaaataggcattcagccaggctgtgcactgcatcaggggctccggacctccgagaaccgcagcgggggctgggacctccacggcatcagctgcagacgtccccttgcccaggagctttatttcgtgcagaccctgctcacaaccagacagctccagcttccccaaagggctgtccagtgtggtgcgtttcatttcacaatccttgtccatggtggcgaccgtctagctcacgacacctgaaatggaagaaaaaaactttgaaccactgtctgaggcttgagaatgaaccaagatccaaactcaaaaagggcaaattccaaggagaattacatcaagtgccaagctggcctaacttcagtctccacccactcagtgtggggaaactccatcgcataaaacccctccccccaacctaaagacgacgtactccaaaagctcgagaactaatcgaggtgcctggacggcgcccggtactccgtggagtcacatgaagcgacggctgaggacggaaaggcccttttcctttgtgtgggtgactcacccgcccgctctcccgagcgccgcgtcctccattttgagctccctgcagcagggccgggaagcggccatctttccgctcacgcaactggtgccgaccgggccagccttgccgcccagggcggggcgatacacggcggcgcgaggccaggcaccagagcaggccggcgagcttgagactacccccgtccgattctcggtggccgcgctcgcaggccccgcctcgccgaacatgtgcgctgggacgcacgggccccgtcgccgcccgcggccccaaaaaccgaaataccagtgtgcagatcttggcccgcatttacaagactatcttgccagaaaaaaagcgtcgcagcaggtcatcaaaaattttaaatggctagagacttatcgaaagcagcgagacaggcgcgaaggtgccaccagattcgcacgcggcggccccagcgcccaggccaggcctcaactcaagcacgaggcgaaggggctccttaagcgcaaggcctcgaactctcccacccacttccaacccgaagctcgggatcaagaatcacgtactgcagccaggggcgtggaagtaattcaaggcacgcaagggccataacccgtaaagaggccaggcccgcgggaaccacacacggcacttacctgtgttctggcggcaaacccgttgcgaaaaagaacgttcacggcgactactgcacttatatacggttctcccccaccctcgggaaaaaggcggagccagtacacgacatcactttcccagtttaccccgcgccaccttctctaggcaccggttcaattgccgacccctccccccaacttctcggggactgtgggcgatgtgcgctctgcccactgacgggcaccggagcctcacgcatgctcttctccacctcagtgatgacgagagcgggcgggtgagggggcgggaacgcagcgatctctgggttctacgttagtgggagtttaacgacggtccctgggattccccaaggcaggggcgagtccttttgtatgaattactcaaatcgataactagtgatatcttaattaacaaacggccgctgcattctagttgtggtttgtccaaactcatcaatgtatcttatcatgtctggatcccatcacaaagctctgacctcaatcctatagaaaggaggaatgagccaaaattcacccaacttattgtgggaagcttgtggaaggctactcgaaatgtttgacccaagttaaacaatttaaaggcaatgctaccaaatactaattgagtgtatgttaacttctgacccactgggaatgtgatgaaagaaataaaagctgaaatgaatcattctctctactattattctgatatttcacattcttaaaataaagtggtgatcctaactgaccttaagacagggaatctttactcggattaaatgtcaggaattgtgaaaaagtgagtttaaatgtatttggctaaggtgtatgtaaacttccgacttcaactgtaggggatcctctagggccgccagtgtgatggatatctgcagaattcggcttcaggtaccgtcgacgatgtaggtcacggtctcgaagccgcggtgcgggtgccagggcgtgcccttgggctccccgggcgcgtactccacctcacccatctggtccatcatgatgaacgggtcgaggtggcggtagttgatcccggcgaacgcgcggcgcaccgggaagccctcgccctcgaaaccgctgggcgcggtggtcacggtgagcacgggacgtgcgacggcgtcggcgggtgcggatacgcggggcagcgtcagcgggttctcgacggtcacggcgggcatgtcgacaagccgaattccagcacactggcggccgttactaggtagctagctcgagccttcgaagatctcctagggaagttcctatactttctagagaataggaacttcggaataggaacttcaccggtgggtgaaaagccgaattctgcagatatcaagcttatcgataccgtcgacctcgagggggggcccggttagatccccgggtaccgagctcgaatatctatgtcgggtgcggagaaagaggtaatgaaatggcattatgggtattatgggtctgcattaacgatagctagcctctaactcctagaccgtcagaactgctgggcccttcaagacgggctgctcacacccactcatgttaagcctggtgaggcctgtactctgttttcacaggaagaaatcctcacccagtcttccccaaacacattcccaggttgtgtcattagtgggatagagatgattattgtggggagaagagaaacatctggatggatttggttaggttgatctatagaggaagtaggtgctgcctgaggtagctgtaatagaagctaaaggtcaaaggagagggccctgtcccaatccagatgactccacttctgctggacccaggttcacaagcttaatctacatttcacctaaatttggctaacaagcccaaaatcacacaggcaaagggagaagtggaggcagaaccgaggttggaggccaccagggccaccgggcagagatcatttaagcccaaccttctcacttctccctgggctctgcctctcttaaaggaccttgtggtgtgacctcttgtaggtccctttcacactcggggcctcagtttccccactgtaaagtgaatgggtcccagctttggtaagcttatgcttacctgatgctttcttcctgggctgctcttgtagagaaaagataaatcttcttcctccatccacgagggcttctttccctgggggtgagagtaggctgaggagagccacttgcacacactcttaaagaaagtattacctgcaccagctcagtgagaggcacagatcagactgttacttgaatcaaattatgagcctccccaaatatatctatgacatttaaataggggattacttgaacatagactttgggatccggtgtggagtgcaggagactagcaaagtgaatcctgagagtagcaggtctgcacctgttggatcgagaaaggcggcctacaattctggtcaaatgagctgtgcttattgacatattctattagagagtactaccaggtcaccagtcaccagaaaggctgccagctctccaaccacctccagggaactatcctgaatggggccttaacaagcctaagagagggttggtttgggtcccaagccaatatttgctctgctttatgtcagtcatatggaacccaaaccaaccctctcctatgtgcctcaccagtcggtgcagggatcccaatttcaagtttggttttttatggtcaaagtccagcatagattaaatgaaggggtgtgatgatggtgttaaaagagaactccagaccagtttaactcttggacacacatcccatctcaccatggtgcttccaaccttccagagatgatgggctcctattttctgatgacaaagccctccacaggattgctgcctggccatcagggagtgcctctgtaactgaggctgagatcccactttcagtcctccagctgtggcccatccctgctccgcccaccgggtatggcctgtcctaggctcttaggtatggctgcattgtgaaatgatggctacagagctggcatctcctgtagtctggttcatctagtgcactacctcatagttaaaagaaatctgtttaagccactgagggtggctcctagtgccaactccaagaacaggaagcttcccttttttgggaggaggggcagatggtaacatggatcgtccaggtcaatgggagcagggcaaccacagtaagtactggacaacaacacaaaactccatgtgtggcttccatcgagtccctctccaattggtttggtcttctccgtcccatgcagcactttagcaaggggcctggctgaaggctatgaattgtgtggagcctcctcattgcagtctccaaccatctgatgctgggaaaatgtcaccaggatgcagccatgccgtgtggccaatgaaccgagaaaacaccccttttctagaatgctctaaagaggcagaataatccagaggtgaggaaggaaatactccaccagagacccaggcagttcctacaaaagccagactttccttcacctagggagtgacaagaccagtggaaaacactctcaagcagtaacccccaaatgctctgcaagccagtggcgtccagataccgcacaagcgagtgggctgtctaatcccatcatcatgatgtaaatatctctaggctgccctgggctgtgcctgaccctgtcttcagctttccacacctccacctacagcccatgcacagaaggaccacccaggaatgctgcaagtgtggcacctccagggccacccagggagaaggagggcagctatgctggtggctccaggggtggtaccttcacaccacaaagcccaaactgaggccccagatttggctgatgagggcatattggacaggggtcacttatgctcttccccattgccacctggcctctggctacctggacttggctacctgtggatcctctcacaggtgccaccatcttggctgagtctccagatgcgaggtccctgaggcagtggcaggcttctcgctaatgctgatgggattaggaatgggataggtggggagggccctggactgggccctgatgagccaagtgggtttttagaggggctactggtacatttcagggacaggacatctggtagagctaagctggggcaataaggagccactgctaatctgagagctagaaacaatcagcttctgggtcattattaattagggtagtttgggctgtgtggaagtcacgtactatatggggtagccacagctctctctacagataatctctaagacttctgattgggaccgtgtgaatgcagtagcaatatctcttcttactgccaggccctgccagtcctgcctccacgccctggctggccccccttatgatctgacccatgccaggctgccatagtatgttacttctgcattagcactccttgggacctgcctctccactgtccctcagactttaaagaactatacaaacccaaggggctcttcccaagagaattgatatgacttgaggtgattccatttctggaagtagtcactccattttctgcctcactctttcagtgcttcacagagcaggttcgaacgaaggagccatccaactaaccgtcatgttcgggcaaccgaagaagggagtggcaggatttcctttggagacttctggaattagacagcagtttaatgcaagcatctaaattctcttcctcccagagtctcattaaaactacagtaagagtttgtgttttgttttgtttttaaagacaaaatcccaccaggatagagagaataggagaggagataacagcatcataatttatgaaactaaaatgcagatagaccaggattaactgactacacagcaccaaggaagctgaatcacaagacagcagaggagaaaactggaaaggatcgtggtctatacggcagaatcttcccaagcctcaggaggaggagctctagatgttcccagatctgggaggtaaagtggaatggggggacatggtcagcgtaatggggttgggctggaagctggttaaggagcaggcagatctctgaatcccctctctgactctgtgtccccaggcatctgcctgtcccccaccctggaagaggtctggcttgaccctttgtctggtgaatttcctgctctgctttcctggtcctgctggccagatcagtggaggccactcacttcaccccacagggatgttctgtgttgccctacacctgggaactggaggtactggaggcaggctgtggtgagcttgaaagcaaaacacagagggcagtccaatctctttggccatatttcttctgcatatccaataccatgtccacaactctgctagtgtcctgatggtggtgggctctacacattcccgggaagctgaaggcagataatgaccaggacaggtcaacctctcttcttctgaaagccttcatctactaatggcctgggactcttcccttaaatgcttagattgtgtcttccactaaggttttttgctgttgctgttgtttgtttgtttgtttgtttgtttgtttgttttgagacggaatctcactctgtcgcccaggctggagtgtagtggcacaatctcagctcaccacaaccttcacctcctaggttgaagggattctcctgcctcagcctcctgagtagctaggattacaggcacatgccaccatgcctggctaatttttgtatttttagtagagacaggatttcgccatgttggccaggctggtcttgaactcctgacctcaggtgatctgcctaccttggtctcccaaagtgctgggattactggtgtgagccaccacacccggccaaggtttttgtttgtttgtttgtttgtttgttttgtattgaggcagggtatcactctggtcacccaggctggagtgcagtagtgcaatcacggctcactgaaacctccacctccctggcgggctcaggtgatcctgccacctcagcttcccaggtagctgggactacaggcttgtaccaccactcccagctaatttttgcgtttttagtagagacagggtttccccatgttgcccaggttggtctcaaactctgggctcaagcgatctgcctgcctcagcctcccaaagtgctgggattacaggtgtaagccaccgtacccggccccgccactaaggttttgaaaatgaagcaattacaagtttaagtctattaataagtgatgaagctatgtagaaaagcagaataattatcttggatcaggaaggtcacatgaggatctacttgggggttgtcaatattctatttcttgacctgatcagtgttgacagcaggttttaattttttacttctttttgtttgtttgtttttgagacggagtcttgctctgtctcccaggctggagtgcagtggtatgatctcggctcactgcaacctccgcctcctgggttcaagctgttctcctgcctcagcctccccagtagctgggattacaggcaggcaccaccacgaccagctaatttttgtatttttagtagagactgggtttcaccatcttggccaggctggtctcgaacttctgatctcgtgatccgccctccttggcctcccaaagtgctgggattacaggcttgagccagcgtgcccggcccattttttacttccttattaaactgtacatataggccttgcacacttttctgcatcaatgttatattccacaataaagggaaaaggtatatacacaacttgataccagtaatgtgaaacatatatttctacatagaaaaaaaaatgactgaaatactgcactccaatgtgttcacacagtagttgtttctggattatttatatattaaatgtttatatattgtattatgccatgaggtttgtgttttctctccacttttctgcattttccaagtttactacaaagagcacatattactcttataatcagaaagtcataaaatatatttaaaaagacaaaattgaaactaataaggatcaacacaaaacagatgagccatctgtggaaatccgcacagaatactacctaaagagattggtgacgtgcatgatctcactaggatgagcacaaagcttgccagagcctagggtctatttctagggttggctcttggaagccaggatagttgttatctctgggaagagggaggggcacacaaggggcttctaaaacattctgaatgttctatttctgaacctggttggtgggtacatgactgttggttttattattatatgttttatatactcttccgtatgtatggtgtggattccaaaaaaagatttcctttagagaaaaccagaatcacataagtagaaaatatggtgctatgttgaaggaacaactcaagtttatataaaatcatcatcatttataggcttaaaaagttgctttggaattttggtctaactgacttgtcttttctgcagcaaaccacgctccttctggacgtgctccaggcagaggggattagggtgggttcaaggctgcaagtacctagctcagcacactctcttcaggggacttagagtttgtctggtgttggctctctgagctcttgtcaggaatgccgacccttccgaggttcaggatttgaagcctgccttcccaccccagatttggtccacacagacactcaagtatgtatttcaactacaaatgacctgtactttcctattactcctctctttcatggtaacctttctggtatccttccttccctacatttatgggagggggacatcattctctgctctcctgtcactgaaggctccaccttctgtcttcttctgacccatctggttttcctggggccacctcctctccttaccaccctaacgcttttgtaacttgaggagaaatgagagatcacctagtcaggtcatcattctctgtagatgaagaggcccaatggtttgctcaagaattgccaagcgagttaaagacagagagtatgagagtcagcaagacctacagaaagcatctatctgcactgttttgcagggacttagcctttgtgtgtggactcctggaatgccacccactaagaaacattgtctgacaccaactccccacttggtaggtggggacactgaaactcatggcaggaaagggccttgccccaagccagggcagagtgtcactcatcactctcaattttcagtccagggcaccttgttgtgactatcccaaaggcagccactttccctggtctgaaagacctgaagagagaagagaagagaaggatggaaggcagagtatgcggctttgattcatttcctggtgaaaacagatctatacgagaagcaaatttcacgaaagggaagagaagaaagtgtcccatacgttgctggcctgtttcaaccttgctttgattcttgctgaaaagggtaccgtgtatttctgagttcaacatgcagaccagtgttaggaaagccactgcacctccactttagcctccagggctgtgccctgcaaatggcctgcagccttggtgcctcgctctccagactgcattttggaagatgggacagaggcttatggaagcccacattagaacgggggagcagaatgggtgagatgagggatccttgatagtgaaccagatgaaggaatggtagccaaatgccaggcctcctttgtggcttcaatccaaaggctctggagcccttccagggcagaacatcaggcatgtttacccccactgtcctcaacagtgacagaggtgcaatcttgggcagctggccattttgaaagcaacctccttaatctcaactgggaaggctccctagcaggacccctgtgttgcacacctggaggaagctagactaaccagaagctcagcacggttccatctgggatgcccaggtctgagacgaaaaaggtaactctcttttctgggtcctggcccagttgtgtctctctccacctcattctctgagatgcctgtctccccttttttgtcccatcaggaggcaagagctatcactgggccagactccaccagaagccaagccagcttgttacccagcttctcagggagcaaagaacagccttgtttctatcttatccccactgtcccctgcccctgccccacctcccagccattcagcttctggcttccccagagctgcctgcttctttgtggtcctccattccttgaaaagaccttctagtcattagtgtatataaatggccacttagcccagattacagtgaggtcaacagctggggctctgagaattgtcacacactggcacaggagaggaggctattcttccagagaatttggagggcactcccatccacttacaacaaaaagcccatccactgtgcttggcagtaggtgatctgagaaccaatggaaccaggttaatcctgtggcactgttgagtgaggagagcagtggcgggcactggaaaatatcagagacaaggcaggagacctgaaatctaggcttagctcctcatatacttggcagctgtatgacctcagacaaccagtgttacctctctaagcctcagtttcctcatgcaaaaggagggggaataacaacagagcccactgcttgggggtgttgtgaggacaggatgaaaaaacaaacagaaatccctcagtacaggattcagtgcagtggacagtcttgcaaggtctggttcagccctccacccctaccctcaccagtataaagaactctggcctacaagtcagatgacctgagttttaatctcagctttgccattagccgtgtgaacttgagaaagtccctttcctttttacatctattgggatgatcatgcattttttgtcctttattctgttaatatagtgtgttacattgattgcttttcatagactgaaccagccttgtattccagggataaatctcacttggtcatggtgtataatcctttatacaaatgttgctgggttgagtttgctagtattttgttgaagatttttatgtcttgattcataaggaatattggtgtaccttccccttttatggccacagtttccctacaatgatgtagtcgaactagacaacctccaatatctttcagtattcatgtcctctgattctgtgaaactaagaaaattaagaaatagtgattcataggcacaaggcaggcaaaacttagactccttgtagaataattaggaagccaaatattcagtgtgcttatttctcaaataaccttagtttctccagtctgccccaactccgaggcctgaatatctctagatgcttatgatggcaactaaagcctaaaagctaattcattttaaagttcttccaaatgcatagggttttatttttccagacctgggttcagatggggaatttgacaaacaatggaaagggggaaaaacaacaatctaaacactgagtgacaaagtaacaaagaaatagtctagctatcagccagtcaagccagccttggctttgctatccaaagtagtcagtctaattctaccaccagtttctgttcctgtagctgtctactgcctgccagggactctgccttcccacccacaactaccaatggaaggatgtggtgaccataccagtggctgctgacatctcctgccatgggaagcataattgcctccagcagcctcccccttagatccatcatttttgttgcacttggcctgggctgtactcccggccaatgactgaacatggtgagcatagtaatgcaggcccatttctgtgaggagcaggactcctccagtaggtgactttggctcaaggactctctattggcctggttgaacttttcctgaactgtgctactgtctgagactcttcttacccaatcctctttctcgccccaattgtcacagaccacctgcattgtggtctgagtctctccccaccttctcttgctcttccctgtttatctttcacaggcatttcccccagtacattccttgaatgtctaacccgatacgggtgcctgacttttggcagacctaagcagacaaaaaggagtacttggttacctagctcttctttctaccacaaacatcgagggaaccctttttccctcacccctctgccacacccccactgccccagtgaacaaccacagagagagctgtggtataatattaggctggtgcaaaagtaattgcggtttttgccattacttttaatggtaaaaaccgcaattacttttgcacctacctagtatttgtgtccccccaaattcatatgttgaaacctaacccacaatatgatgtcattaggaggcaagaccttgaggaggtgattagatgatggggtggagctctcctgaatgagattagtgcccttataagaagaagcccaaggaagctaccttgactcttccatcacatgagaatgcagcaagaaggcaccatctactaatcaggaagagagctctcaccagacactgaatctgccagtgtcttgatcttgaagttcccagcctccagaactatgcataatgcatttccattgtctctaagccacccagcctatggtattttgtcatagcagcctgaactgactaagacagtgagccacatgagaagtgccccaacccctcccttaagcacttggctcacagatcagtgggttcatttctgcctgagttttattgttattctgtagatttcttgggctagatatatttttctgttattttccttcttcacctcagtcatgaattggttgttttaaaaaagacaatgtaagtcatggggaaactcctgacaactctactctcctagggttcctgataaaaggggattcagttgagtcctctgatggtctctacctgccaaagtccagcagcccttagcaaacatgctgctcgtttctgtagagaaggtgctggtgtcccaccatacttctctctccctcatgaagggcttgcgacccagcaaatgggtggcttatatgggtctgtttcaaaggaagagccagctctgggaagaaaaacgatgagcataagcataacctaccactgtgcctgggaaagcagacaacttttttgatgtgtgaatatctaatgagaatggaatccatcaattaccttaaacttaggcacagtcttcaaattcaatatatgtgggatatacttttagtcagtttgtagacgttatttgtaataaataatctggcttctctaaagaaattattttaagtgtttggtttggtttgatttaatggtaaaattatatttagtggcagagaattatagcaatggtgataaactatagagtgtcataagttcatatcttattctcacatttgaagctgcctgcagatgcattcaagatgcagccagaagtcaggagactcaggctgttatttggagctcatcattttacagccttgctggactcccactttctcaggggaaaaatgtggtgttgacccagattagctctccaggccctgctgagttgggcactctgtaagctggagggtcttctattgtcttcacctaagtgtcaatcaacaacccaaatgggcatgggggaagagggagctgggccaatgcccagggtgcctggtagagagataccttgggcactggaaggcaccagcttcccagagagaagggggagggccatgaaaaagttggctgtagatgccagggacactgggactctccagctgtgtgtttgtgccttctgaagacttatgtttcattcctttggagcatgcataatcatacactgtgggatgtgttatatagattgcttgatagttcaccactgtaataaaatactgtgactggaatctgctcccagtctgcctttgatagcacttgtgcaacacacatttactgagcatttacagtgatccaggacctgtgttgtgaaaacattgatggacaaggcagatggtggagcacgtcagtgaggatttttaacaaaggctggtaagtgctataaaggaacattgtaggacactagagaacaaagaacaggagaacctgacttaggctggggtggggcgttggttagaggaggctccttggaggacatgaggtttaagctgtgacctgaggatgaatagatgttggccagtgaggttaattaacctcaaatcgtcacttccgttttcccacgttacgtcacttcccattttaagaaaactacaattcccaacacatacaagttactccgccctaaaacctacgtcacccgccccgttcccacgccccgcgccacgtcacaaactccaccccctcattatcatattggcttcaatccaaaataaggtatattattgatgatg

SEQ ID NO: 64 - DNA, 33514 bp, Artificial Sequence
  LCR-F8 (Ad5, Sleeping beauty IR, HS4 to HS1, beta promoter, ET3, mgmt, EF1a promoter, and Ad5)
catcatcaataatataccttattttggattgaagccaatatgataatgagggggtggagtttgtgacgtggcgcggggcgtgggaacggggcgggtgacgtagtagtgtggcggaagtgtgatgttgcaagtgtggcggaacacatgtaagcgacggatgtggcaaaagtgacgtttttggtgtgcgccggtgtacacaggaagtgacaattttcgcgcggttttaggcggatgttgtagtaaatttgggcgtaaccgagtaagatttggccattttcgcgggaaaactgaataagaggaagtgaaatctgaataattttgtgttactcatagcgcgtaatatttgtctagggccgcggggactttgaccgtttacgtggagactcgcccaggtgtttttctcaggtgttttccgcgttccgggtcaaagttggcgttttgattcggccgaaggattacatgagcttagaaatgtaattagcatagtgtgtggcatagtgtagataccaaataaatatgatctctccttctactcttgaaaatgcaaacacattcttggtggtcctaaaatagcctgtaacatggtttactcagcagcatttgctattcaaggcagatctgcctttagtcattggctgcgctcctgaacagctgtgtgaaaggctaacttttgtaaaccaaatcaaaataaaatgcagcaaaaatttgtcactgaaaggaaatcctcagtatatccttttatgaaatgaaagatccctcatccaaacttaacttttttaaaagtgcgcatttggagatatagccctttcttatgaatcctaattcaattttggccataaacacacgttgatgttccccaccccaaagcacatagcaacaagagtaggttctatattgaaaataatgacaatttaaaaacatgtacttatttcactgtatgtggacagtgtctatgattgcatcatgaagtgtcatataaccatgtacgtgtacatgagagagagatagagagagaagtggtagggtggtggtggtagaggggatggcgatagtaatcatggtaatggtagaggtgatggaggtggtaatgacggaggtaagggtggtagtgatgatggtggtggtggtaatggtggtggatgtggtggtggcaattgggatggtgggatggtggtagccatggtgatggtggtaatggtgttgatttaaagggtggtggtagtgaaggtgagggtagtggtggtggaggtggtggtgctggtagcaatagtgatggtggtgatggtgttgatgagggtgttgggatcagggtgagttcccacagtatatttcattcttgttgtaccactctgtcaacagcaccactgactgggacagaggaagaaggcacactctgaatgtgttattaacagaaacctcaaaacagtctgtctccttgtagtcattcaaaattatctttttcttacctggaaaactgaaactgaattaccgggaaaaacacaggagatttttgtttgttaatatgctgccaataaagtaattttatgtcaaatttaactacaggaaagggcaaggcattttctaagttccttagatgtcatgtggctaaaaaaaacaaaaggatggacagcagttagatactgtacacttagctgtttgaagccatatattcagaaagcagatgttgggagttggtgtttgaggactgatttcctggaggtattttatataggccaagttcattgttctaaactctaagggcttgacttgagggaggaaaagaggcaagaacatgtttagttttgctgacagcatcacatgggcagccctaaggctagacaactttagggcctgaagcttattctaggaaagaagcacctacagagtggcactgggctcccctccactatagagatgaagtcatatgacagtaaagggcaggcagggctgcctagggggcccattgaaattgcggccgcaaataatgggcccggagcaagagagagggaggcaatgacagcagagacatgcctgcgccttgggtttgagtgcccagtggtcaaatccacttccctgtggctgatgcttgcctttctaactttggaatttaggggttggagatctggtgagaaggtaggagggagatgaggaggagaagggaaaggcaggaaggaaggggagggaaaggaaaagcaaaaggggaggaggaaggtttccaacaaattattctatatcaactgcggaaatcaaaatttgttgcccaaatcttagaagctcatgtccctcctccccagaagtctggaatgcagcactccaggggtagcttataacccaaatatctatctgtaaaaagagaaacattgggctttcgagctgtggattctcagtaaaagcaagaggcctcagcctacacaggccagcccagagtttgaggaaccccaggcccacacccacagggctggcccctgggtctgcatactccctagaaatgtgcacacttctgagcctcaactctgtcctggagtctaacagcatccctctccttcctggggcagttccacctccagaaacctgttaccttgggccttatgtcaaggaaactgtgggaaagagctaggcaggaatgcagatgaggccagcatgggctcctaaaagtttagaaataggcagtgtcatgctcccaggtgcctgcataaaccagctgaaaaatggagctcccctcaccagcactctcccttcaaacagactgtgatttgcaggtcactggtttaccaagccaggctacccaggcaggacccagatgccaagcccagtggtgtcctgcaagctgagcagtgctcagttcttgcaaaaaaaggtctgtgtgaaggcaaggcctctgcctggcttctcaccccagttgggtgtctggaacaggaaggagcccttactgcagaaaaaggaggagggagcaaagggagcgaacagctgcgtgctccatggggaggatccccaaagtagaaaggcgcatacacactgcagcccttgacccagaatgctcacagctacattacagattcaggtctcctcagtgtagtggggctgctgatgagactgtggcatcctcaggggtcaggacacacattttccatcactcttctgatggcaaaaaacctctgagccaatgccaacctctgatcattaaaaaaaagtgctcacagcagtgtgtggtttaggatcatgccctgtgtggtttggaacacgtgcacaaccacaccttgttcatcaccatcccagaaaccctgacgcaggcaaagagcagagttattaaccctactttactgatgtggatactgaggcccagaggctcatgcaagttatcaataagtggcagggacagttgcctctagattaactagcccctaggatcacctgggtcttggaaggggacccataaacatgagctcccctctcttggggccagatttgcacctgtgccgcgccttcagcctgcatgaagtaggggctgctggcaaagactcaaagctgtaaatctgggttttctcttgaggcttctaagggagctgtttcgacaactcactctgttcccagctggctgcccctgcatagggttttaaagcagcctagctttctgccaggcttggcagtggacaacgctggtcagaacatcccagagagctaccagaatgaagtaagtttgcttctactctttacctgtttatgggctgtctctgccactggaatgaaaggcactgagaacagtgcctggcctgcagaaggccctggaaatacctgagctcctaatctgggaataggagtaggaagagctttggaggcagggcacctgagtttgagatctacaacttcctgcctgtgtgacattgggaaagtctccatcctttctgagcctcagtctccaccctggggaagtggaaatatcaatctctgtgacacagaagcaaatgagcgaatgtgcacaaagtaccttgcacaagagagacgctcaaacacttgcctccaggtttcaccgagaactacagagtaagatagatttgttcccagtggaggaagcctgggaataatttgcccctagactatgaattcctggggctcaagatcgagcacagggccaggcacacagaagggaccctggaaatgtggcaggaggccagagatagacaggcccttagagctcatacccatgccctctgacctcaagaagaaagaaacctgctcaaaatctcacaaagagcttgttccaaccctgaatcgagtctgaggactccttcctgagtccagcactttttctgcaagaagtatatgcctccaaagctgatgggcgcaaatcttgaaccccgtcacataaacacaaagggaggaggtgactagagctcctcctactggatatgtctaaggtcaccagtctaaagaaaagggatggatagaatgaggccagtatttttgcagccatccaaatgtccacatacgctgttacactgagggctcctctctcccccgtcttcagccctacttgcatttagaggtgagaaagatatgggctgaggggttgtttttcatcgtattgtagatggaaagcacactgcccttggggccatccaaatgtggaccttgatgtagcaccccaccttctggatggccatccttctgaaagtcactgaatttctcagactttattctctttatccataaagaaggagaataataataatccccccaccctgcccaaccactgactggttgggaagctcagaagaaatactgggcacggcatcccattgtaatctatagagtgagtcgcttcttaatattaaatggctgaacacagaagatgtgcaaaaagtactgtgtccccttcctcctccaactgaacatttcatgccctttgcaccctcattttgtctaggagctgccttatgaagggaataggtacctgctccgagctggaggaatctttgccacttatggtggggtatggactgagacagagatggcatgtgacatgcgcactgagtctcaactccatgcaggctctggagcactctcaaattggagtactaatgccttttaaattctcacactagcaatcctttgacctactgatctagggatctagggaaagaatcgtgatcttaacttcaaagggaaggacaaaatgttctgcctcctgttaaaactccatacactaagtgcagagactggatgccttattaaccttgggtagatgcccaaatgttcaaaaggtcaaactcttctgttccccagatcgccagagtcattaaccagtcacactattaaatgaatgaacagatgctgaaaaggtacttgcattactgagatttcttatggtgatggcccctgcctgatatgtattcagcattttgtagttttcaatgtgcattagagtatagtggtgatgacattggcctctgagtttgccacttcttatatctgtgactttggtcaaattgcttaatctctctgagtctcggtttcctggagataataatagcttcttcttcccagggttatcatgaggattacaggagataatgccccaaaaatgcttagtaaagtgcctagcacctagtcaatgctgaattaaaggtggttattcttacttttcgttcatttgaactttgttctcagggagggcaaaggatagacaaagccccatagctagtgaggagtagctgcaagactagaacccaggtgttctgagccctagtcttaggccaagaacaactgttacgtgagatgcacgttttccttcaagggagctcacaattatttccatgtaaattcaaggactgctaaaagagaactctcctctgggactgataaacatctagtcgagtatcgacaaataggggttccgcgcacatttccccgaaaagtgccacctgacgtaactataacggtcctaaggtagcgaaagcttgcatgcctgcaggtcgactctagaggatcaaacctagccaccgcggtggcggccggctagccggctagccggctagccctagaactagtaacggccgccagtgtgctggaattcggcttgtaaggtaccggtgaagttcctatactttctagagaataggaacttcggaataggaacttctacctagatgcatgctcgagcggcccctacagttgaagtcggaagtttacatacacttaagttggagtcattaaaactcgtttttcaactactccacaaatttcttgttaacaaacaatagttttggcaagtcagttaggacatctactttgtgcatgacacaagtcatttttccaacaattgtttacagacagattatttcacttataattcactgtatcacaattccagtgggtcagaagtttacatacactaagttgactgtgcctttaaacagcttggaaaattccagaaaatgatgtcatggctttagaagcttctgatagactaattgacatcatttgagtcaattggaggtgtacctgtggatgtatttcaaggaattctgtggaatgtgtgtcagttagggtgtggaaagtccccaggctccccagcaggcagaagtatgcaaagcatgcatatcgatactagtttataagatctcgagctagcggccgtttgttaattaagtcgacggtaccgtcaaggctgcagtgagacatgatcttgccactgcactccagcctggacagcagagtgaaaccttgcctcacgaaacagaatacaaaaacaaacaaacaaaaaactgctccgcaatgcgcttccttgatgctctaccacataggtctgggtactttgtacacattatctcattgctgttcataattgttagattaattttgtaatattgatattattcctagaaagctgaggcctcaagatgataacttttattttctggacttgtaatagctttctcttgtattcaccatgttgtaactttcttagagtagtaacaatataaagttattgtgagtttttgcaaacacagcaaacacaacgacccatatagacattgatgtgaaattgtctattgtcaatttatgggaaaacaagtatgtactttttctactaagccattgaaacaggaataacagaacaagattgaaagaatacattttccgaaattacttgagtattatacaaagacaagcacgtggacctgggaggagggttattgtccatgactggtgtgtggagacaaatgcaggtttataatagatgggatggcatctagcgcaatgactttgccatcacttttagagagctcttggggaccccagtacacaagaggggacgcagggtatatgtagacatctcattctttttcttagtgtgagaataagaatagccatgacctgagtttatagacaatgagcccttttctctctcccactcagcagctatgagatggcttgccctgcctctctactaggctgactcactccaaggcccagcaatgggcagggctctgtcagggctttgatagcactatctgcagagccagggccgagaaggggtggactccagagactctccctcccattcccgagcagggtttgcttatttatgcatttaaatgatatatttattttaaaagaaataacaggagactgcccagccctggctgtgacatggaaactatgtagaatattttgggttccatttttttttccttctttcagttagaggaaaaggggctcaggatccacttgcccagtgttcttccttagttcctaccttcgaccttgatcctcctttatcttcctgaaccctgctgagatgatctatgtggggagaatggcttctttgagaaacatcttcttcgttagtggcctgcccctcattcccactttaatatccagaatcactataagaagaatataataagaggaataactcttattataggtaagggaaaattaagaggcatacgtgatgggatgagtaagagaggagagggaaggattaatggacgataaaatctactactatttgttgagaccttttatagtctaatcaattttgctattgttttccatcctcacgctaactccataaaaaaacactattattatctttattttgccatgacaagactgagctcagaagagtcaagcatttgcctaaggtcggacatgtcagaggcagtgccagacctatgtgagactctgcagctactgctcatgggccctgtgctgcactgatgaggaggatcagatggatggggcaatgaagcaaaggaatcattctgtggataaaggagacagccatgaagaagtctatgactgtaaatttgggagcaggagtctctaaggacttggatttcaaggaattttgactcagcaaacacaagaccctcacggtgactttgcgagctggtgtgccagatgtgtctatcagaggttccagggagggtggggtggggtcagggctggccaccagctatcagggcccagatgggttataggctggcaggctcagataggtggttaggtcaggttggtggtgctgggtggagtccatgactcccaggagccaggagagatagaccatgagtagagggcagacatgggaaaggtgggggaggcacagcatagcagcatttttcattctactactacatgggactgctcccctatacccccagctaggggcaagtgccttgactcctatgttttcaggatcatcatctataaagtaagagtaataattgtgtctatctcatagggttattatgaggatcaaaggagatgcacactctctggaccagtggcctaacagttcaggacagagctatgggcttcctatgtatgggtcagtggtctcaatgtagcaggcaagttccagaagatagcatcaaccactgttagagatatactgccagtctcagagcctgatgttaatttagcaatgggctgggaccctcctccagtagaaccttctaaccagctgctgcagtcaaagtcgaatgcagctggttagactttttttaatgaaagcttgcatgcagcactttgggaggctgaggtgggtggactgcttggagctcaggagttcaagaccatcttggacaacatggtgataccctgcctctacaaaaagtacaaaaattagcctggcatggtggtgtgcacctgtaatcccagctattagggtggctgaggcaggagaattgcttgaacccgggaggcggaggttgcagtgagctgagatcgtgccactgcactccagcctgggggacagagcacattataattaactgttattttttacttggactcttgtggggaataagatacatgttttattcttatttatgattcaagcactgaaaatagtgtttagcatccagcaggtgcttcaaaaccatttgctgaatgattactatactttttacaagctcagctccctctatcccttccagcatcctcatctctgattaaataagcttcagtttttccttagttcctgttacatttctgtgtgtctccattagtgacctcccatagtccaagcatgagcagttctggccaggcccctgtcggggtcagtgccccacccccgccttctggttctgtgtaaccttctaagcaaaccttctggctcaagcacagcaatgctgagtcatgatgagtcatgctgaggcttagggtgtgtgcccagatgttctcagcctagagtgatgactcctatctgggtccccagcaggatgcttacagggcagatggcaaaaaaaaggagaagctgaccacctgactaaaactccacctcaaacggcatcataaagaaaatggatgcctgagacagaatgtgacatattctagaatatattatttcctgaatatatatatatatatacacatataccatatgaaacacctctaggctataaggcaacagagctccttttttttttttctgtgctttcctggctgtccaaatctctaatgataagcatacttctattcaatgagaatattctgtaagattatagttaagaattgtgggagccattccgtctcttatagttaaatttgagcttcttttatgatcactgtttttttaatatgctttaagttctggggtacatgtgccatggtggtttgctgcacccatcaacccgtcatctacattaggtatttctcctaatgctatccttcccctagccccccacccccaacaggccccagtgtgtgatgttcccctccctgtgtccatggatcactggtttttttttgttttttttttttttttaaagtctcagttaaatttttggaatgtaatttattttcctggtatcctaaggacttgcaagttatctggtcactttagccctcacgttttgatgataatcacatatttgtaaacacaacacacacacacacacacacacacatatatatatatataaaacatatatatacataaacacacataacatatttatcgggcatttctgagcaactaatcatgcaggactctcaaacactaacctatagccttttctatgtatctacttgtgtagaaaccaagcgtggggactgagaaggcaatagcaggagcattctgactctcactgcctttagctaggcccctccctcatcacagctcagcatagtcctgagctcttatctatatccacacacagtttctgacgctgcccagctatcaccatcccaagtctaaagaaaaaaataatgggtttgcccatctctgttgattagaaaacaaaacaaaataaaataagcccctaagctcccagaaaacatgactaaaccagcaagaagaagaaaatacaataggtatatgaggagactggtgacactaagtgtctgaatgaggcttgagtacagaaaagaggctctagcagcatagtggtttagaggagatgtttctttccttcacagatgccttagcctcaataagcttgcggttgtggaagtttacttgtttatcaccggtgacgtccatgagcaaattaagaaaaacaacaacaaatgaatgcatatatatgtatatgtatgtgtgtatatatacacatatatatatatattttttttcttttcttaccagaaggttttaatccaaataaggagaagatatgcttagaactgaggtagagttttcatccattctgtcctgtaagtattttgcatattctggagacgcaggaagagatccatctacatatcccaaagctgaattatggtagacaaaactcttccacttttagtgcatcaatttcttatttgtgtaataagaaaattgggaaaacgatcttcaatatgcttaccaagctgtgattccaaatattacgtaaatacacttgcaaaggaggatgtttttagtagcaatttgtactgatggtatggggccaagagatatatcttagagggagggctgagggtttgaagtccaactcctaagccagtgccagaagagccaaggacaggtacggctgtcatcacttagacctcaccctgtggagccacaccctagggttggccaatctactcccaggagcagggagggcaggagccagggctgggcataaaagtcagggcagagccatctattgcttacatttgcttctgacacaactgtgttcactagcaacctcaaacagacacctcgagtttcgattgctagcttcgaactcgagccaccatgcagctagagctctccacctgtgtctttctgtgtctcttgccactcggctttagtgccatcaggagatactacctgggcgcagtggaactgtcctgggactaccggcaaagtgaactcctccgtgagctgcacgtggacaccagatttcctgctacagcgccaggagctcttccgttgggcccgtcagtcctgtacaaaaagactgtgttcgtagagttcacggatcaacttttcagcgttgccaggcccaggccaccatggatgggtctgctgggtcctaccatccaggctgaggtttacgacacggtggtcgttaccctgaagaacatggcttctcatcccgttagtcttcacgctgtcggcgtctccttctggaaatcttccgaaggcgctgaatatgaggatcacaccagccaaagggagaaggaagacgataaagtccttcccggtaaaagccaaacctacgtctggcaggtcctgaaagaaaatggtccaacagcctctgacccaccatgtcttacctactcatacctgtctcacgtggacctggtgaaagacctgaattcgggcctcattggagccctgctggtttgtagagaagggagtctgaccagagaaaggacccagaacctgcacgaatttgtactactttttgctgtctttgatgaagggaaaagttggcactcagcaagaaatgactcctggacacgggccatggatcccgcacctgccagggcccagcctgcaatgcacacagtcaatggctatgtcaacaggtctctgccaggtctgatcggatgtcataagaaatcagtctactggcacgtgattggaatgggcaccagcccggaagtgcactccatttttcttgaaggccacacgtttctcgtgaggcaccatcgccaggcttccttggagatctcgccactaactttcctcactgctcagacattcctgatggaccttggccagttcctactgttttgtcatatctcttcccaccaccatggtggcatggaggctcacgtcagagtagaaagctgcgccgaggagccccagctgcggaggaaagctgatgaagaggaagattatgatgacaatttgtacgactcggacatggacgtggtccggctcgatggtgacgacgtgtctccctttatccaaatccgctcagttgccaagaagcatcctaaaacttgggtacattacattgctgctgaagaggaggactgggactatgctcccttagtcctcgcccccgatgacagaagttataaaagtcaatatttgaacaatggccctcagcggattggtaggaagtacaaaaaagtccgatttatggcatacacagatgaaacctttaagacgcgtgaagctattcagcatgaatcaggaatcttgggacctttactttatggggaagttggagacacactgttgattatatttaagaatcaagcaagcagaccatataacatctaccctcacggaatcactgatgtccgtcctttgtattcaaggagattaccaaaaggtgtaaaacatttgaaggattttccaattctgccaggagaaatattcaaatataaatggacagtgactgtagaagatgggccaactaaatcagatccgcggtgcctgacccgctattactctagtttcgttaatatggagagagatctagcttcaggactcattggccctctcctcatctgctacaaagaatctgtagatcaaagaggaaaccagataatgtcagacaagaggaatgtcatcctgttttctgtatttgatgagaaccgaagctggtacctcacagagaatatacaacgctttctccccaatccagctggagtgcagcttgaggatccagagttccaagcctccaacatcatgcacagcatcaatggctatgtttttgatagtttgcagttgtcagtttgtttgcatgaggtggcatactggtacattctaagcattggagcacagactgacttcctttctgtcttcttctctggatataccttcaaacacaaaatggtctatgaagacacactcaccctattcccattctcaggagaaactgtcttcatgtcgatggaaaacccaggtctatggattctggggtgccacaactcagactttcggaacagaggcatgaccgccttactgaaggtttctagttgtgacaagaacactggtgattattacgaggacagttatgaagatatttcagcatacttgctgagtaaaaacaatgccattgaacctaggagctttgcccagaattcaagaccccctagtgcgagcgctccaaagcctccggtcctgcgacggcatcagagggacataagccttcctacttttcagccggaggaagacaaaatggactatgatgatatcttctcaactgaaacgaagggagaagattttgacatttacggtgaggatgaaaatcaggaccctcgcagctttcagaagagaacccgacactatttcattgctgcggtggagcagctctgggattacgggatgagcgaatccccccgggcgctaagaaacagggctcagaacggagaggtgcctcggttcaagaaggtggtcttccgggaatttgctgacggctccttcacgcagccgtcgtaccgcggggaactcaacaaacacttggggctcttgggaccctacatcagagcggaagttgaagacaacatcatggtaactttcaaaaaccaggcgtctcgtccctattccttctactcgagccttatttcttatccggatgatcaggagcaaggggcagaacctcgacacaacttcgtccagccaaatgaaaccagaacttacttttggaaagtgcagcatcacatggcacccacagaagacgagtttgactgcaaagcctgggcctacttttctgatgttgacctggaaaaagatgtgcactcaggcttgatcggcccccttctgatctgccgcgccaacaccctgaacgctgctcacggtagacaagtgaccgtgcaagaatttgctctgtttttcactatttttgatgagacaaagagctggtacttcactgaaaatgtggaaaggaactgccgggccccctgccatctgcagatggaggaccccactctgaaagaaaactatcgcttccatgcaatcaatggctatgtgatggatacactccctggcttagtaatggctcagaatcaaaggatccgatggtatctgctcagcatgggcagcaatgaaaatatccattcgattcattttagcggacacgtgttcagtgtacggaaaaaggaggagtataaaatggccgtgtacaatctctatccgggtgtctttgagacagtggaaatgctaccgtccaaagttggaatttggcgaatagaatgcctgattggcgagcacctgcaagctgggatgagcacgactttcctggtgtacagcaagaagtgtcagactcccctgggaatggcttctggacacattagagattttcagattacagcttcaggacaatatggacagtgggccccaaagctggccagacttcattattccggatcaatcaatgcctggagcaccaaggagcccttttcttggatcaaggtggatctgttggcaccaatgattattcacggcatcaagacccagggtgcccgtcagaagttctccagcctctacatctctcagtttatcatcatgtatagtcttgatgggaagaagtggcagacttatcgaggaaattccactggaaccttaatggtcttctttggcaatgtggattcatctgggataaaacacaatatttttaaccctccaattattgctcgatacatccgtttgcacccaactcattatagcattcgcagcactcttcgcatggagttgatgggctgtgatttaaatagttgcagcatgccattgggaatggagagtaaagcaatatcagatgcacagattactgcttcatcctactttaccaatatgtttgccacctggtctccttcaaaagctcgacttcacctccaagggaggagtaatgcctggagacctcaggtgaataatccaaaagagtggctgcaagtggacttccagaagacaatgaaagtcacaggagtaactactcagggagtaaaatctctgcttaccagcatgtatgtgaaggagttcctcatctccagcagtcaagatggccatcagtggactctcttttttcagaatggcaaagtaaaggtttttcagggaaatcaagactccttcacacctgtggtgaactctctagacccaccgttactgactcgctaccttcgaattcacccccagagttgggtgcaccagattgccctgaggatggaggttctgggctgcgaggcacaggacctctactgagggcggccgccaccccaccagtgcaggctgcctatcagaaagtggtggctggtgtggctaatgccctggcccacaagtatcactaagctcgctttcttgctgtccaatttctattaaaggttcctttgttccctaagtccaactactaaactgggggatattatgaagggccttgagcatctggattctgcctaataaaaaacatttattttcattgcaatgatgtatttaaattatttctgaatattttactaaaaagggaatgtgggaggtcagtgcatttaaaacataaagaaatgaagagctagttcaaaccttgggaaaatacactatatcttaaactccatgaaagaaggtgaggctgcaaacagctaatgcacattggcaacagcccctgatgcctatgccttattcatccctcagaaaaggattcaagtagaggcttgatttggaggttaaagttttgctatgctgtattttacattacttattgttttagctgtcctcatgaatgtcttttcactacccatttgcttatcctgcatctctcagccttgactccactcagttctcttgcttagagataccacctttcccctgaagtgttccttccatgttttacggcgagatggtttctcctcgcctggccactcagccttagttgtctctgttgtcttatagaggtctacttgaagaaggaaaaacagggggcatggtttgactgtcctgtgagcccttcttccctgcctcccccactcacagtgacccggaatctgcagtgctagtctcccggaactatcactctttcacagtctgctttggaaggactgggcttagtatgaaaagttaggactgagaagaatttgaaagggggctttttgtagcttgatattcactactgtcttattaccctatcataggcccaccccaaatggaagtcccattcttcctcaggatgtttaagattagcattcaggaagagatcagaggtctgctggctcccttatcatgtcccttatggtgcttctggctctgcagttattagcatagtgttaccatcaaccaccttaacttcatttttcttattcaatacctagaaagcttatcgaccccatcctcactgactccgtcctggagttggatgagagataatggccttacgttgtgccaggggagggtcgggctggatttagcaagatttaccttctccaaagagcggtgctgcagtggcacagctgcccacggaggtgggggggtcaccgtccctggaggtgatgaagaactgtggggatgtggcactgagggacatggccagtgggcacggtgggtgggttggggttggtcttggggatcttggagggcttttccagccttcatgatttgacgattgtatgaacatctacatggcaattctccagctgcctgtcccagtcctactgacccagctgtatctctccaggcaagctcttccaccccttctgcttgcatccagacaccatcaaacatgcaggctcagacacagggaccagcagtgtctgtggcctttttgtgctcctctccatgctgggttttaacttgctctttgtccttctatcctatcttcttatccttaaggctgttctgaacgctgtgacttggagagtgtcccagagccctcaacacctgcatgtcccacgtccatgctgtcctgcacttccttatccccaagatctgcctctccgtgatgcactgaattggcaaacatgtgtcaccccagaccaacaatgtcacagcaaactcccccttgataggacaagggggaatggctttacactgagacaggggaggtttgggttggatatgaggaggcagtttttcccccagagggtggtgacgcactgaacaggttgcccaaggaggctgtggatgccccatccctgcaggcattcaaggccaggctggatgtggctctgggcagcctgggctgctggttgatgaccctgcacatagcagggggttggatctggatgagcactgtgctcctttgcaacccaggccgttctatgattctgtcattctaaatctctctttcagcctaaagctttttccccgtatccccccaggtgtctgcaggctcaaagagcagcgagaagcgttcagaggaaagcgatcccgtgccaccttccccgtgcccgggctgtccccgcacgctgccggctcggggatgcggggggagcgccggaccggagcggagccccgggcggctcgctgctgccccctagcgggggagggacgtaattacatccctgggggctttgggggggggctgtccctatcgattactagttttaccacatttgtagaggttttacttgctttaaaaaacctcccacacctccccctgaacctgaaacataaaatgaatgcaattgttgttgttaacttgtttattgcagcttataatggttacaaataaagcaatagcatcacaaatttcacaaataaagcatttttttcactgcattctagttgtggtttgtccaaactcatcaatgtatcttatcatgtctgctcgaagagcggccgcttcagtttcggccagcaggcggggagcccgaggtagctcccgctcccttgagccaggcccctgccagacctgagctccctcccaagcctggcttccccaaccggtggccttcatgggccagaagccattccttcacggctagccctccggagtagttgcccacggctccgctgctgcagaccactctgtggcacgggatgaggatcttgacaggattgcctctcatggcgcctcccactgctcgcgcggctttggggttgccggccagggcggccaattgctggtaagaaatcacttctccgaatttcacaaccttaagcagcttccataacacctgacgcgtgaacgactcttgctggaaaacgggatggtgaagcgctggcacggggaactcttcgatagcctcgggctggtggaaataggcattcagccaggctgtgcactgcatcaggggctccggacctccgagaaccgcagcgggggctgggacctccacggcatcagctgcagacgtccccttgcccaggagctttatttcgtgcagaccctgctcacaaccagacagctccagcttccccaaagggctgtccagtgtggtgcgtttcatttcacaatccttgtccatggtggcgaccgtctagctcacgacacctgaaatggaagaaaaaaactttgaaccactgtctgaggcttgagaatgaaccaagatccaaactcaaaaagggcaaattccaaggagaattacatcaagtgccaagctggcctaacttcagtctccacccactcagtgtggggaaactccatcgcataaaacccctccccccaacctaaagacgacgtactccaaaagctcgagaactaatcgaggtgcctggacggcgcccggtactccgtggagtcacatgaagcgacggctgaggacggaaaggcccttttcctttgtgtgggtgactcacccgcccgctctcccgagcgccgcgtcctccattttgagctccctgcagcagggccgggaagcggccatctttccgctcacgcaactggtgccgaccgggccagccttgccgcccagggcggggcgatacacggcggcgcgaggccaggcaccagagcaggccggcgagcttgagactacccccgtccgattctcggtggccgcgctcgcaggccccgcctcgccgaacatgtgcgctgggacgcacgggccccgtcgccgcccgcggccccaaaaaccgaaataccagtgtgcagatcttggcccgcatttacaagactatcttgccagaaaaaaagcgtcgcagcaggtcatcaaaaattttaaatggctagagacttatcgaaagcagcgagacaggcgcgaaggtgccaccagattcgcacgcggcggccccagcgcccaggccaggcctcaactcaagcacgaggcgaaggggctccttaagcgcaaggcctcgaactctcccacccacttccaacccgaagctcgggatcaagaatcacgtactgcagccaggggcgtggaagtaattcaaggcacgcaagggccataacccgtaaagaggccaggcccgcgggaaccacacacggcacttacctgtgttctggcggcaaacccgttgcgaaaaagaacgttcacggcgactactgcacttatatacggttctcccccaccctcgggaaaaaggcggagccagtacacgacatcactttcccagtttaccccgcgccaccttctctaggcaccggttcaattgccgacccctccccccaacttctcggggactgtgggcgatgtgcgctctgcccactgacgggcaccggagcctcacgcatgctcttctccacctcagtgatgacgagagcgggcgggtgagggggcgggaacgcagcgatctctgggttctacgttagtgggagtttaacgacggtccctgggattccccaaggcaggggcgagtccttttgtatgaattactcaactagtgatatcttaattaacaaacggccgctgcattctagttgtggtttgtccaaactcatcaatgtatcttatcatgtctggatcccatcacaaagctctgacctcaatcctatagaaaggaggaatgagccaaaattcacccaacttattgtgggaagcttgtggaaggctactcgaaatgtttgacccaagttaaacaatttaaaggcaatgctaccaaatactaattgagtgtatgttaacttctgacccactgggaatgtgatgaaagaaataaaagctgaaatgaatcattctctctactattattctgatatttcacattcttaaaataaagtggtgatcctaactgaccttaagacagggaatctttactcggattaaatgtcaggaattgtgaaaaagtgagtttaaatgtatttggctaaggtgtatgtaaacttccgacttcaactgtaggggatcctctagggccgccagtgtgatggatatctgcagaattcggcttcaggtaccgtcgacgatgtaggtcacggtctcgaagccgcggtgcgggtgccagggcgtgcccttgggctccccgggcgcgtactccacctcacccatctggtccatcatgatgaacgggtcgaggtggcggtagttgatcccggcgaacgcgcggcgcaccgggaagccctcgccctcgaaaccgctgggcgcggtggtcacggtgagcacgggacgtgcgacggcgtcggcgggtgcggatacgcggggcagcgtcagcgggttctcgacggtcacggcgggcatgtcgacaagccgaattccagcacactggcggccgttactaggtagctagctcgagccttcgaagatctcctagggaagttcctatactttctagagaataggaacttcggaataggaacttcaccggtgggtgaaaagccgaattctgcagatatcaagcttatcgataccgtcgacctcgagggggggcccggttagatccccgggtaccgagctcgaattcatctatgtcgggtgcggagaaagaggtaatgaaatggcattatgggtattatgggtctgcattaacgatagctagcctctaactcctagaccgtcagaactgctgggcccttcaagacgggctgctcacacccactcatgttaagcctggtgaggcctgtactctgttttcacaggaagaaatcctcacccagtcttccccaaacacattcccaggttgtgtcattagtgggatagagatgattattgtggggagaagagaaacatctggatggatttggttaggttgatctatagaggaagtaggtgctgcctgaggtagctgtaatagaagctaaaggtcaaaggagagggccctgtcccaatccagatgactccacttctgctggacccaggttcacaagcttaatctacatttcacctaaatttggctaacaagcccaaaatcacacaggcaaagggagaagtggaggcagaaccgaggttggaggccaccagggccaccgggcagagatcatttaagcccaaccttctcacttctccctgggctctgcctctcttaaaggaccttgtggtgtgacctcttgtaggtccctttcacactcggggcctcagtttccccactgtaaagtgaatgggtcccagctttggtaagcttatgcttacctgatgctttcttcctgggctgctcttgtagagaaaagataaatcttcttcctccatccacgagggcttctttccctgggggtgagagtaggctgaggagagccacttgcacacactcttaaagaaagtattacctgcaccagctcagtgagaggcacagatcagactgttacttgaatcaaattatgagcctccccaaatatatctatgacatttaaataggggattacttgaacatagactttgggatccggtgtggagtgcaggagactagcaaagtgaatcctgagagtagcaggtctgcacctgttggatcgagaaaggcggcctacaattctggtcaaatgagctgtgcttattgacatattctattagagagtactaccaggtcaccagtcaccagaaaggctgccagctctccaaccacctccagggaactatcctgaatggggccttaacaagcctaagagagggttggtttgggtcccaagccaatatttgctctgctttatgtcagtcatatggaacccaaaccaaccctctcctatgtgcctcaccagtcggtgcagggatcccaatttcaagtttggttttttatggtcaaagtccagcatagattaaatgaaggggtgtgatgatggtgttaaaagagaactccagaccagtttaactcttggacacacatcccatctcaccatggtgcttccaaccttccagagatgatgggctcctattttctgatgacaaagccctccacaggattgctgcctggccatcagggagtgcctctgtaactgaggctgagatcccactttcagtcctccagctgtggcccatccctgctccgcccaccgggtatggcctgtcctaggctcttaggtatggctgcattgtgaaatgatggctacagagctggcatctcctgtagtctggttcatctagtgcactacctcatagttaaaagaaatctgtttaagccactgagggtggctcctagtgccaactccaagaacaggaagcttcccttttttgggaggaggggcagatggtaacatggatcgtccaggtcaatgggagcagggcaaccacagtaagtactggacaacaacacaaaactccatgtgtggcttccatcgagtccctctccaattggtttggtcttctccgtcccatgcagcactttagcaaggggcctggctgaaggctatgaattgtgtggagcctcctcattgcagtctccaaccatctgatgctgggaaaatgtcaccaggatgcagccatgccgtgtggccaatgaaccgagaaaacaccccttttctagaatgctctaaagaggcagaataatccagaggtgaggaaggaaatactccaccagagacccaggcagttcctacaaaagccagactttccttcacctagggagtgacaagaccagtggaaaacactctcaagcagtaacccccaaatgctctgcaagccagtggcgtccagataccgcacaagcgagtgggctgtctaatcccatcatcatgatgtaaatatctctaggctgccctgggctgtgcctgaccctgtcttcagctttccacacctccacctacagcccatgcacagaaggaccacccaggaatgctgcaagtgtggcacctccagggccacccagggagaaggagggcagctatgctggtggctccaggggtggtaccttcacaccacaaagcccaaactgaggccccagatttggctgatgagggcatattggacaggggtcacttatgctcttccccattgccacctggcctctggctacctggacttggctacctgtggatcctctcacaggtgccaccatcttggctgagtctccagatgcgaggtccctgaggcagtggcaggcttctcgctaatgctgatgggattaggaatgggataggtggggagggccctggactgggccctgatgagccaagtgggtttttagaggggctactggtacatttcagggacaggacatctggtagagctaagctggggcaataaggagccactgctaatctgagagctagaaacaatcagcttctgggtcattattaattagggtagtttgggctgtgtggaagtcacgtactatatggggtagccacagctctctctacagataatctctaagacttctgattgggaccgtgtgaatgcagtagcaatatctcttcttactgccaggccctgccagtcctgcctccacgccctggctggccccccttatgatctgacccatgccaggctgccatagtatgttacttctgcattagcactccttgggacctgcctctccactgtccctcagactttaaagaactatacaaacccaaggggctcttcccaagagaattgatatgacttgaggtgattccatttctggaagtagtcactccattttctgcctcactctttcagtgcttcacagagcaggttcgaacgaaggagccatccaactaaccgtcatgttcgggcaaccgaagaagggagtggcaggatttcctttggagacttctggaattagacagcagtttaatgcaagcatctaaattctcttcctcccagagtctcattaaaactacagtaagagtttgtgttttgttttgtttttaaagacaaaatcccaccaggatagagagaataggagaggagataacagcatcataatttatgaaactaaaatgcagatagaccaggattaactgactacacagcaccaaggaagctgaatcacaagacagcagaggagaaaactggaaaggatcgtggtctatacggcagaatcttcccaagcctcaggaggaggagctctagatgttcccagatctgggaggtaaagtggaatggggggacatggtcagcgtaatggggttgggctggaagctggttaaggagcaggcagatctctgaatcccctctctgactctgtgtccccaggcatctgcctgtcccccaccctggaagaggtctggcttgaccctttgtctggtgaatttcctgctctgctttcctggtcctgctggccagatcagtggaggccactcacttcaccccacagggatgttctgtgttgccctacacctgggaactggaggtactggaggcaggctgtggtgagcttgaaagcaaaacacagagggcagtccaatctctttggccatatttcttctgcatatccaataccatgtccacaactctgctagtgtcctgatggtggtgggctctacacattcccgggaagctgaaggcagataatgaccaggacaggtcaacctctcttcttctgaaagccttcatctactaatggcctgggactcttcccttaaatgcttagattgtgtcttccactaaggttttttgctgttgctgttgtttgtttgtttgtttgtttgtttgtttgttttgagacggaatctcactctgtcgcccaggctggagtgtagtggcacaatctcagctcaccacaaccttcacctcctaggttgaagggattctcctgcctcagcctcctgagtagctaggattacaggcacatgccaccatgcctggctaatttttgtatttttagtagagacaggatttcgccatgttggccaggctggtcttgaactcctgacctcaggtgatctgcctaccttggtctcccaaagtgctgggattactggtgtgagccaccacacccggccaaggtttttgtttgtttgtttgtttgtttgttttgtattgaggcagggtatcactctggtcacccaggctggagtgcagtagtgcaatcacggctcactgaaacctccacctccctggcgggctcaggtgatcctgccacctcagcttcccaggtagctgggactacaggcttgtaccaccactcccagctaatttttgcgtttttagtagagacagggtttccccatgttgcccaggttggtctcaaactctgggctcaagcgatctgcctgcctcagcctcccaaagtgctgggattacaggtgtaagccaccgtacccggccccgccactaaggttttgaaaatgaagcaattacaagtttaagtctattaataagtgatgaagctatgtagaaaagcagaataattatcttggatcaggaaggtcacatgaggatctacttgggggttgtcaatattctatttcttgacctgatcagtgttgacagcaggttttaattttttacttctttttgtttgtttgtttttgagacggagtcttgctctgtctcccaggctggagtgcagtggtatgatctcggctcactgcaacctccgcctcctgggttcaagctgttctcctgcctcagcctccccagtagctgggattacaggcaggcaccaccacgaccagctaatttttgtatttttagtagagactgggtttcaccatcttggccaggctggtctcgaacttctgatctcgtgatccgccctccttggcctcccaaagtgctgggattacaggcttgagccagcgtgcccggcccattttttacttccttattaaactgtacatataggccttgcacacttttctgcatcaatgttatattccacaataaagggaaaaggtatatacacaacttgataccagtaatgtgaaacatatatttctacatagaaaaaaaaatgactgaaatactgcactccaatgtgttcacacagtagttgtttctggattatttatatattaaatgtttatatattgtattatgccatgaggtttgtgttttctctccacttttctgcattttccaagtttactacaaagagcacatattactcttataatcagaaagtcataaaatatatttaaaaagacaaaattgaaactaataaggatcaacacaaaacagatgagccatctgtggaaatccgcacagaatactacctaaagagattggtgacgtgcatgatctcactaggatgagcacaaagcttgccagagcctagggtctatttctagggttggctcttggaagccaggatagttgttatctctgggaagagggaggggcacacaaggggcttctaaaacattctgaatgttctatttctgaacctggttggtgggtacatgactgttggttttattattatatgttttatatactcttccgtatgtatggtgtggattccaaaaaaagatttcctttagagaaaaccagaatcacataagtagaaaatatggtgctatgttgaaggaacaactcaagtttatataaaatcatcatcatttataggcttaaaaagttgctttggaattttggtctaactgacttgtcttttctgcagcaaaccacgctccttctggacgtgctccaggcagaggggattagggtgggttcaaggctgcaagtacctagctcagcacactctcttcaggggacttagagtttgtctggtgttggctctctgagctcttgtcaggaatgccgacccttccgaggttcaggatttgaagcctgccttcccaccccagatttggtccacacagacactcaagtatgtatttcaactacaaatgacctgtactttcctattactcctctctttcatggtaacctttctggtatccttccttccctacatttatgggagggggacatcattctctgctctcctgtcactgaaggctccaccttctgtcttcttctgacccatctggttttcctggggccacctcctctccttaccaccctaacgcttttgtaacttgaggagaaatgagagatcacctagtcaggtcatcattctctgtagatgaagaggcccaatggtttgctcaagaattgccaagcgagttaaagacagagagtatgagagtcagcaagacctacagaaagcatctatctgcactgttttgcagggacttagcctttgtgtgtggactcctggaatgccacccactaagaaacattgtctgacaccaactccccacttggtaggtggggacactgaaactcatggcaggaaagggccttgccccaagccagggcagagtgtcactcatcactctcaattttcagtccagggcaccttgttgtgactatcccaaaggcagccactttccctggtctgaaagacctgaagagagaagagaagagaaggatggaaggcagagtatgcggctttgattcatttcctggtgaaaacagatctatacgagaagcaaatttcacgaaagggaagagaagaaagtgtcccatacgttgctggcctgtttcaaccttgctttgattcttgctgaaaagggtaccgtgtatttctgagttcaacatgcagaccagtgttaggaaagccactgcacctccactttagcctccagggctgtgccctgcaaatggcctgcagccttggtgcctcgctctccagactgcattttggaagatgggacagaggcttatggaagcccacattagaacgggggagcagaatgggtgagatgagggatccttgatagtgaaccagatgaaggaatggtagccaaatgccaggcctcctttgtggcttcaatccaaaggctctggagcccttccagggcagaacatcaggcatgtttacccccactgtcctcaacagtgacagaggtgcaatcttgggcagctggccattttgaaagcaacctccttaatctcaactgggaaggctccctagcaggacccctgtgttgcacacctggaggaagctagactaaccagaagctcagcacggttccatctgggatgcccaggtctgagacgaaaaaggtaactctcttttctgggtcctggcccagttgtgtctctctccacctcattctctgagatgcctgtctccccttttttgtcccatcaggaggcaagagctatcactgggccagactccaccagaagccaagccagcttgttacccagcttctcagggagcaaagaacagccttgtttctatcttatccccactgtcccctgcccctgccccacctcccagccattcagcttctggcttccccagagctgcctgcttctttgtggtcctccattccttgaaaagaccttctagtcattagtgtatataaatggccacttagcccagattacagtgaggtcaacagctggggctctgagaattgtcacacactggcacaggagaggaggctattcttccagagaatttggagggcactcccatccacttacaacaaaaagcccatccactgtgcttggcagtaggtgatctgagaaccaatggaaccaggttaatcctgtggcactgttgagtgaggagagcagtggcgggcactggaaaatatcagagacaaggcaggagacctgaaatctaggcttagctcctcatatacttggcagctgtatgacctcagacaaccagtgttacctctctaagcctcagtttcctcatgcaaaaggagggggaataacaacagagcccactgcttgggggtgttgtgaggacaggatgaaaaaacaaacagaaatccctcagtacaggattcagtgcagtggacagtcttgcaaggtctggttcagccctccacccctaccctcaccagtataaagaactctggcctacaagtcagatgacctgagttttaatctcagctttgccattagccgtgtgaacttgagaaagtccctttcctttttacatctattgggatgatcatgcattttttgtcctttattctgttaatatagtgtgttacattgattgcttttcatagactgaaccagccttgtattccagggataaatctcacttggtcatggtgtataatcctttatacaaatgttgctgggttgagtttgctagtattttgttgaagatttttatgtcttgattcataaggaatattggtgtaccttccccttttatggccacagtttccctacaatgatgtagtcgaactagacaacctccaatatctttcagtattcatgtcctctgattctgtgaaactaagaaaattaagaaatagtgattcataggcacaaggcaggcaaaacttagactccttgtagaataattaggaagccaaatattcagtgtgcttatttctcaaataaccttagtttctccagtctgccccaactccgaggcctgaatatctctagatgcttatgatggcaactaaagcctaaaagctaattcattttaaagttcttccaaatgcatagggttttatttttccagacctgggttcagatggggaatttgacaaacaatggaaagggggaaaaacaacaatctaaacactgagtgacaaagtaacaaagaaatagtctagctatcagccagtcaagccagccttggctttgctatccaaagtagtcagtctaattctaccaccagtttctgttcctgtagctgtctactgcctgccagggactctgccttcccacccacaactaccaatggaaggatgtggtgaccataccagtggctgctgacatctcctgccatgggaagcataattgcctccagcagcctcccccttagatccatcatttttgttgcacttggcctgggctgtactcccggccaatgactgaacatggtgagcatagtaatgcaggcccatttctgtgaggagcaggactcctccagtaggtgactttggctcaaggactctctattggcctggttgaacttttcctgaactgtgctactgtctgagactcttcttacccaatcctctttctcgccccaattgtcacagaccacctgcattgtggtctgagtctctccccaccttctcttgctcttccctgtttatctttcacaggcatttcccccagtacattccttgaatgtctaacccgatacgggtgcctgacttttggcagacctaagcagacaaaaaggagtacttggttacctagctcttctttctaccacaaacatcgagggaaccctttttccctcacccctctgccacacccccactgccccagtgaacaaccacagagagagctgtggtataatattaggctggtgcaaaagtaattgcggtttttgccattacttttaatggtaaaaaccgcaattacttttgcacctacctagtatttgtgtccccccaaattcatatgttgaaacctaacccacaatatgatgtcattaggaggcaagaccttgaggaggtgattagatgatggggtggagctctcctgaatgagattagtgcccttataagaagaagcccaaggaagctaccttgactcttccatcacatgagaatgcagcaagaaggcaccatctactaatcaggaagagagctctcaccagacactgaatctgccagtgtcttgatcttgaagttcccagcctccagaactatgcataatgcatttccattgtctctaagccacccagcctatggtattttgtcatagcagcctgaactgactaagacagtgagccacatgagaagtgccccaacccctcccttaagcacttggctcacagatcagtgggttcatttctgcctgagttttattgttattctgtagatttcttgggctagatatatttttctgttattttccttcttcacctcagtcatgaattggttgttttaaaaaagacaatgtaagtcatggggaaactcctgacaactctactctcctagggttcctgataaaaggggattcagttgagtcctctgatggtctctacctgccaaagtccagcagcccttagcaaacatgctgctcgtttctgtagagaaggtgctggtgtcccaccatacttctctctccctcatgaagggcttgcgacccagcaaatgggtggcttatatgggtctgtttcaaaggaagagccagctctgggaagaaaaacgatgagcataagcataacctaccactgtgcctgggaaagcagacaacttttttgatgtgtgaatatctaatgagaatggaatccatcaattaccttaaacttaggcacagtcttcaaattcaatatatgtgggatatacttttagtcagtttgtagacgttatttgtaataaataatctggcttctctaaagaaattattttaagtgtttggtttggtttgatttaatggtaaaattatatttagtggcagagaattatagcaatggtgataaactatagagtgtcataagttcatatcttattctcacatttgaagctgcctgcagatgcattcaagatgcagccagaagtcaggagactcaggctgttatttggagctcatcattttacagccttgctggactcccactttctcaggggaaaaatgtggtgttgacccagattagctctccaggccctgctgagttgggcactctgtaagctggagggtcttctattgtcttcacctaagtgtcaatcaacaacccaaatgggcatgggggaagagggagctgggccaatgcccagggtgcctggtagagagataccttgggcactggaaggcaccagcttcccagagagaagggggagggccatgaaaaagttggctgtagatgccagggacactgggactctccagctgtgtgtttgtgccttctgaagacttatgtttcattcctttggagcatgcataatcatacactgtgggatgtgttatatagattgcttgatagttcaccactgtaataaaatactgtgactggaatctgctcccagtctgcctttgatagcacttgtgcaacacacatttactgagcatttacagtgatccaggacctgtgttgtgaaaacattgatggacaaggcagatggtggagcacgtcagtgaggatttttaacaaaggctggtaagtgctataaaggaacattgtaggacactagagaacaaagaacaggagaacctgacttaggctggggtggggcgttggttagaggaggctccttggaggacatgaggtttaagctgtgacctgaggatgaatagatgttggccagtgaggttacctcaaatcgtcacttccgttttcccacgttacgtcacttcccattttaagaaaactacaattcccaacacatacaagttactccgccctaaaacctacgtcacccgccccgttcccacgccccgcgccacgtcacaaactccaccccctcattatcatattggcttcaatccaaaataaggtatattattgatgatg

SEQ ID NO: 65 - DNA, 47 bp, Artificial Sequence
  top strand of GATAA motif
caaacccttcctggagcctgtgataaaagcaactgttagcttgcact

SEQ ID NO: 66 - DNA, 47 bp, Artificial Sequence
  bottom strand of GATAA motif
agtgcaagctaacagttgcttttatcacaggctccaggaagggtttg

SEQ ID NO: 67 - DNA, 47 bp, Artificial Sequence
  top strand of disrupted GATAA motif
caaacccttcctggagcctgtaataaaagcaactgttagcttgcact

SEQ ID NO: 68 - DNA, 47 bp, Artificial Sequence
  bottom strand of distrupted GATAA motif
agtgcaagctaacagttgcttttattacaggctccaggaagggtttg

SEQ ID NO: 69 - DNA, 24 bp, Artificial Sequence
  HBG2 forward primer
tccttctgtcattttgcctctgtt

SEQ ID NO: 70 - DNA, 23 bp, Artificial Sequence
  HBB primer
ttgagcaatgtggacagagaagg

SEQ ID NO: 71 - DNA, 40 bp, Artificial Sequence
  HDAd-BEHBG-106
ttggccagccttgccttgaccaatagccttgacaaggcaa

SEQ ID NO: 72 - DNA, 27 bp, Artificial Sequence
  HBG2 reverse primer
cacttcattgtagttaccgtggaaaga

SEQ ID NO: 73 - protein, 340 aa, Artificial Sequence
  Sleeping Beauty transposase enzyme
MGKSKEISQDLRKKIVDLHKSGSSLGAISKRLKVPRSSVQTIVRKYKHHGTTQPSYRSGRRRYLSPRDERTLVRKVQINPRTTAKDLVKMLEETGTKVSISTVKRVLYRHNLKGRSARKKPLLQNRHKKARLRFATAHGDKDRTFWRNVLWSDETKIELFGHNDHRYVWRKKGEACKPKNTIPTVKHGGGSIMLWGCFAAGGTGALHKIDGIMRKENYVDILKQHLKTSVRKLKLGRKWVFQMDNDPKHTSKVVAKWLKDNKVKVLEWPSQSPDLNPIENLWAELKKRVRARRPTNLTQLHQLCQEEWAKIHPTYCGKLVEGYPKRLTQVKQFKGNATKY

SEQ ID NO: 74 - protein, 340 aa, Artificial Sequence
  Hyperactive Sleeping Beauty is SB100X
MGKSKEISQDLRKRIVDLHKSGSSLGAISKRLAVPRSSVQTIVRKYKHHGTTQPSYRSGRRRYLSPRDERTLVRKVQINPRTTAKDLVKMLEETGTKVSISTVKRVLYRHNLKGHSARKKPLLQNRHKKARLRFATAHGDKDRTFWRNVLWSDETKIELFGHNDHRYVWRKKGEACKPKNTIPTVKHGGGSIMLWGCFAAGGTGALHKIDGIMDAVQYVDILKQHLKTSVRKLKLGRKWVFQHDNDPKHTSKVVAKWLKDNKVKVLEWPSQSPDLNPIENLWAELKKRVRARRPTNLTQLHQLCQEEWAKIHPNYCGKLVEGYPKRLTQVKQFKGNATKY

SEQ ID NO: 75 - protein, 423 aa, Artificial Sequence
  Flp (flippase)
MPQFGILCKTPPKVLVRQFVERFERPSGEKIALCAAELTYLCWMITHNGTAIKRATFMSYNTIISNSLSFDIVNKSLQFKYKTQKATILEASLKKLIPAWEFTIIPYYGQKHQSDITDIVSSLQLQFESSEEADKGNSHSKKMLKALLSEGESIWEITEKILNSFEYTSRFTKTKTLYQFLFLATFINCGRFSDIKNVDPKSFKLVQNKYLGVIIQCLVTETKTSVSRHIYFFSARGRIDPLVYLDEFLRNSEPVLKRVNRTGNSSSNKQEYQLLKDNLVRSYNKALKKNAPYSIFAIKNGPKSHIGRHLMTSFLSMKGLTELTNVVGNWSDKRASAVARTTYTHQITAIPDHYFALVSRYYAYDPISKEMIALKDETNPIEEWQHIEQLKGSAEGSIRYPAWNGIISQEVLDYLSSYINRRI

SEQ ID NO: 76 - DNA, 34 bp, Artificial Sequence
  FRT recognition site
gaagttcctatactttctagagaataggaacttc

SEQ ID NO: 77 - protein, 374 aa, Artificial Sequence
  variant of the Flp protein
MNEQAKQLVAVTRQPALNAGVGLVLAQLAEVEARQIPGSLAEARAHCLAQGAPDILLVEVENPQTLAADLAALAECCPPQMRLVLLGERGDVTLFRWLISVGVDDYYPAPLDPDALRTGLLRLLGVPLVTSLRKGRVICVVGAAGGVGTSTVAANLAMALADQHHRQVALLDLNLHHSRHPILLGSDYAPPGEQWWQATDRLDGTLLAHTAHQLGPRLFLFYDEGQELVLGAEQLVAAVNVMAEHYSTLIIDVPDLRTHGLRALLQEADVVLWLHDFSLGALRLLGQCPQGGQAQRRLLVGNHCRGKEGRVPAQELERVCGQPHAAVLPYDHGVFVRAERAGQPLIQQKSKLARALTLLAGELVGAQVTGRGRR

SEQ ID NO: 78 - protein, 432 aa, Artificial Sequence
  variant of the Flp protein
MAPKKKRKVMSQFDILCKTPPKVLVRQFVERFERPSGEKIASCAAELTYLCWMITHNGTAIKRATFMSYNTIISNSLSFDIVNKSLQFKYKTQKATILEASLKKLIPAWEFTIIPYNGQKHQSDITDIVSSLQLQFESSEEADKGNSHSKKMLKALLSEGESIWEITEKILNSFEYTSRFTKTKTLYQFLFLATFINCGRFSDIKNVDPKSFKLVQNKYLGVIIQCLVTETKTSVSRHIYFFSARGRIDPLVYLDEFLRNSEPVLKRVNRTGNSSSNKQEYQLLKDNLVRSYNKALKKNAPYPIFAIKNGPKSHIGRHLMTSFLSMKGLTELTNVVGNWSDKRASAVARTTYTHQITAIPDHYFALVSRYYAYDPISKEMIALKDETNPIEEWQHIEQLKGSAEGSIRYPAWNGIISQEVLDYLSSYINRRI

SEQ ID NO: 79 - protein, 343 aa, Artificial Sequence
  Cre
MSNLLTVHQNLPALPVDATSDEVRKNLMDMFRDRQAFSEHTWKMLLSVCRSWAAWCKLNNRKWFPAEPEDVRDYLLYLQARGLAVKTIQQHLGQLNMLHRRSGLPRPSDSNAVSLVMRRIRKENVDAGERAKQALAFERTDFDQVRSLMENSDRCQDIRNLAFLGIAYNTLLRIAEIARIRVKDISRTDGGRMLIHIGRTKTLVSTAGVEKALSLGVTKLVERWISVSGVADDPNNYLFCRVRKNGVAAPSATSQLSTRALEGIFEATHRLIYGAKDDSGQRYLAWSGHSARVGAARDMARAGVSIPEIMQAGGWTNVNIVMNYIRNLDSETGAMVRLLEDGD

SEQ ID NO: 80 - DNA, 34 bp, Artificial Sequence
  loxP site
ataacttcgtatagcatacattatacgaagttat

SEQ ID NO: 81 - DNA, 34 bp, Artificial Sequence
  lox recognition site (lox2272)
ataacttcgtataaagtatcctatacgaagttat

SEQ ID NO: 82 - DNA, 34 bp, Artificial Sequence
  lox recognition site (lox511)
ataacttcgtataatgtatgctatacgaagttat

SEQ ID NO: 83 - DNA, 34 bp, Artificial Sequence
  lox recognition site (lox66)
ataacttcgtatagcatacattatacgaacggta

SEQ ID NO: 84 - DNA, 34 bp, Artificial Sequence
  lox recognition site (lox71
taccgttcgtatagcatacattatacgaagttat

SEQ ID NO: 85 - DNA, 34 bp, Artificial Sequence
  lox recognition site (loxM2)
ataacttcgtataagaaaccatatacgaagttat

SEQ ID NO: 86 - DNA, 34 bp, Artificial Sequence
  lox recognition site (lox5171)
ataacttcgtataatgtgtactatacgaagttat

SEQ ID NO: 87 - protein, 380 aa, Vibrio plasmid p0908
MIENQLSLLGDFSGVRPDDVKTAIQAAQKKGINVAENEQFKAAFEHLLNEFKKREERYSPNTLRRLESAWTCFVDWCLANHRHSLPATPDTVEAFFIERAEELHRNTLSVYRWAISRVHRVAGCPDPCLDIYVEDRLKAIARKKVREGEAVKQASPFNEQHLLKLTSLWYRSDKLLLRRNLALLAVAYESMLRASELANIRVSDMELAGDGTAILTIPITKTNHSGEPDTCILSQDVVSLLMDYTEAGKLDMSSDGFLFVGVSKHNTCIKPKKDKQTGEVLHKPITTKTVEGVFYSAWETLDLGRQGVKPFTAHSARVGAAQDLLKKGYNTLQIQQSGRWSSGAMVARYGRAILARDGAMAHSRVKTRSAPMQWGKDEKD

SEQ ID NO: 88 - DNA, 34 bp, Artificial Sequence
  VloxP recognition site
tcaatttccgagaatgacagttctcagaaattga

SEQ ID NO: 89 - protein, 342 aa, Enterobacteria phage D6
MSELIISGSSGGFLRNIGKEYQEAAENFMRFMNDQGAYAPNTLRDLRLVFHSWARWCHARQLAWFPISPEMAREYFLQLHDADLASTTIDKHYAMLNMLLSHCGLPPLSDDKSVSLAMRRIRREAATEKGERTGQAIPLRWDDLKLLDVLLSRSERLVDLRNRAFLFVAYNTLMRMSEISRIRVGDLDQTGDTVTLHISHTKTITTAAGLDKVLSRRTTAVLNDWLDVSGLREHPDAVLFPPIHRSNKARITTTPLTAPAMEKIFSDAWVLLNKRDATPNKGRYRTWTGHSARVGAAIDMAEKQVSMVEIMQEGTWKKPETLMRYLRRGGVSVGANSRLMDS

SEQ ID NO: 90 - DNA, 32 bp, Artificial Sequence
  rox recognition site
taactttaaataattggcattatttaaagtta

SEQ ID NO: 91 - protein, 10 aa, Artificial Sequence
  CD33-specific CDRL1
TASSSVNYIH

SEQ ID NO: 92 - protein, 6 aa, Artificial Sequence
  CD33-specific CDRL2
TSKVAS

SEQ ID NO: 93 - protein, 9 aa, Artificial Sequence
  CD33-specific CDRL3
QQWRSYPLT

SEQ ID NO: 94 - protein, 5 aa, Artificial Sequence
  CD33-specific CDRH1
DYVVH

SEQ ID NO: 95 - protein, 17 aa, Artificial Sequence
  CD33-specific CDRH2
YINPYNDGTKYNEKFKG

SEQ ID NO: 96 - protein, 11 aa, Artificial Sequence
  CD33-specific CDRH3
DYRYEVYGMDY

SEQ ID NO: 97 - protein, 14 aa, Artificial Sequence
  CD33-specific CDRL1
RASEVDNYGISFMN

SEQ ID NO: 98 - protein, 7 aa, Artificial Sequence
  CD33-specific CDRL2
AASNQGS

SEQ ID NO: 99 - protein, 8 aa, Artificial Sequence
  CD33-specific CDRL3
QQSKEVPW

SEQ ID NO: 100 - protein, 5 aa, Artificial Sequence
  CD33-specific CDRH1
DYNMH

SEQ ID NO: 101 - protein, 17 aa, Artificial Sequence
  CD33-specific CDRH2
YIYPYNGGTGYNQKFKS

SEQ ID NO: 102 - protein, 7 aa, Artificial Sequence
  CD33-specific CDRH3
GRPAMDY

SEQ ID NO: 103 - protein, 115 aa, Artificial Sequence
  CD33-specific variable light chain
DIVLTQSPTIMSASPGERVTMTCTASSSVNYIHWYQQKSGDSPKRWIFDTSKVASGVPARFSGSGSGTSYSLTISTMEAEDAATYYCQQWRSYPLTFGDGTRLELKRADAAPTVS

SEQ ID NO: 104 - protein, 120 aa, Artificial Sequence
  CD33-specific variable heavy chain
EVKLQESGPELVKPGASVKMSCKASGYKFTDYVVHWLKQKPGQGLEWIGYINPYNDGTKYNEKFKGKATLTSDKSSSTAYMEVSSLTSEDSAVYYCARDYRYEVYGMDYWGQGTSVTVSS

SEQ ID NO: 105 - DNA, 25 bp, Artificial Sequence
  HBG1-seq primer
tttccttagaaaccactgctaactg

SEQ ID NO: 106 - protein, 115 aa, Artificial Sequence
  human CD33-specific variable heavy chain
DIVLTQSPAIMSASPGEKVTMTCSANSSVSYIHWYQQKSGTSPKRWIFDTSKLASGVPARFSGSGSGTSYSLTISTMEAEDAATYYCQQWTSHPLTFGTGTKLQLKRADAAPTVS

SEQ ID NO: 107 - protein, 10 aa, Artificial Sequence
  CD33FL-specific CDRL1
GYAFSNYWMN

SEQ ID NO: 108 - protein, 17 aa, Artificial Sequence
  CD33FL-specific CDRL2
QIYPGNFNTDYNGQFKG

SEQ ID NO: 109 - protein, 12 aa, Artificial Sequence
  CD33FL-specific CDRL3
FFDFGAYFTLDY

SEQ ID NO: 110 - protein, 11 aa, Artificial Sequence
  CD33FL-specific CDRH1
KASQDIKSYLS

SEQ ID NO: 111 - protein, 7 aa, Artificial Sequence
  CD33FL-specific CDRH2
YATTLAD

SEQ ID NO: 112 - protein, 9 aa, Artificial Sequence
  CD33FL-specific CDRH3
LHHGESPWT

SEQ ID NO: 113 - protein, 234 aa, Artificial Sequence
  human CD33FL-specific variable light chain
METDTLLLWVLLLWVPGSTGDIKMTQSPSSIYASLGERVTINCKASQDIKSYLSWYQQKPWKSPKTLIYYATTLADGVPSRFSGSGSGQDYSLTISSLESDDTATYYCLHHGESPWTFGEGTKLEIKRADAAPTVSIFPPSSEQLTSGGASVVCFLNNFYPKDINVKWKIDGSERQNGVLNSWTDQDSKDSTYSMSSTLTLTKDEYERHNSYTCEATHKTSTSPIVKSFNRNEC

SEQ ID NO: 114 - protein, 471 aa, Artificial Sequence
  human CD33FL-specific variable heavy chain
METDTLLLWVLLLWVPGSTGQVQLQQSGAEVVKPGASVKISCRASGYAFSNYWMNWVKQRPGKGLEWIGQIYPGNFNTDYNGQFKGKATLTVDKSSNTAYMQLSSLTSEDSAVYFCARFFDFGAYFTLDYWGQGTSVTVSSAKTTAPSVYPLAPVCGDTTGSSVTLGCLVKGYFPEPVTLTWNSGSLSSGVHTFPAVLQSDLYTLSSSVTVTSSTWPSQSITCNVAHPASSTKVDKKIEPRGPTIKPCPPCKCPAPNLLGGPSVFIFPPKIKDVLMISLSPIVTCVVVDVSEDDPDVQISWFVNNVEVHTAQTQTHREDYNSTLRVVSALPIQHQDWMSGKEFKCKVNNKDLPAPIERTISKPKGSVRAPQVYVLPPPEEEMTKKQVTLTCMVTDFMPEDIYVEWTNNGKTELNYKNTEPVLDSDGSYFMYSKLRVEKKNWVERNSYSCSVVHEGLHNHHTTKSFSRTPGK

SEQ ID NO: 115 - protein, 10 aa, Artificial Sequence
  CD33 deltaE2-specific CDRL1
GYTFTTYWMH

SEQ ID NO: 116 - protein, 13 aa, Artificial Sequence
  CD33 deltaE2-specific CDRL2
AIYPGNSDTSYNQ

SEQ ID NO: 117 - protein, 7 aa, Artificial Sequence
  CD33 deltaE2-specific CDRL3
YDGYHFI

SEQ ID NO: 118 - protein, 16 aa, Artificial Sequence
  CD33 deltaE2-specific CDRH1
RSSQSLLHSNGITYLY

SEQ ID NO: 119 - protein, 7 aa, Artificial Sequence
  CD33 deltaE2-specific CDRH2
QMSNLAS

SEQ ID NO: 120 - protein, 9 aa, Artificial Sequence
  CD33 deltaE2-specific CDRH3
AQNLELPPT

SEQ ID NO: 121 - protein, 239 aa, Artificial Sequence
  human CD33 deltaE2-specific variable light chain
METDTLLLWVLLLWVPGSTGDIVMTQAAFSNPVTLGTSASISCRSSQSLLHSNGITYLYWYLQKPGQSPQLLIYQMSNLASGVPDRFSSSGSGTDFTLRISRVEAEDVGVYYCAQNLELPPTFGGGTKLEIKRADAAPTVSIFPPSSEQLTSGGASVVCFLNNFYPKDINVKWKIDGSERQNGVLNSWTDQDSKDSTYSMSSTLTLTKDEYERHNSYTCEATHKTSTSPIVKSFNRNEC

SEQ ID NO: 122 - protein, 473 aa, Artificial Sequence
  human CD33 deltaE2-specific variable heavy chain
METDTLLLWVLLLWVPGSTGEVQLQQSGTVLARPGASVKMSCKASGYTFTTYWMHWIKQSPGQGLEWIGAIYPGNSDTSYNQKFKGKAKLTAVTSASTAYMELSSLTNEDSAVYYCEIYDGYHFIYWGQGTTLTVSSAKTTPPSVYPLAPGCGDTTGSSVTLGCLVKGYFPESVTVTWNSGSLSSSVHTFPALLQSGLYTMSSSVTVPSSTWPSQTVTCSVAHPASSTTVDKKLEPSGPISTINPCPPCKECHKCPAPNLEGGPSVFIFPPNIKDVLMISLTPKVTCVVVDVSEDDPDVQISWFVNNVEVHTAQTQTHREDYNSTIRVVSTLPIQHQDWMSGKEFKCKVNNKDLPSPIERTISKIKGLVRAPQVYILPPPAEQLSRKDVSLTCLVVGFNPGDISVEWTSNGHTEENYKDTAPVLDSDGSYFIYSKLNMKTSKWEKTDSFSCNVRHEGLKNYYLKKTISRSPGK

SEQ ID NO: 123 - protein, 11 aa, Artificial Sequence
  HER2-specific CDRL1
KASQDVSIGVA

SEQ ID NO: 124 - protein, 6 aa, Artificial Sequence
  HER2-specific CDRL2
ASYRYT

SEQ ID NO: 125 - protein, 9 aa, Artificial Sequence
  HER2-specific CDRL3
QQYYIYPYT

SEQ ID NO: 126 - protein, 10 aa, Artificial Sequence
  HER2-specific CDRH1
GFTFTDYTMD

SEQ ID NO: 127 - protein, 16 aa, Artificial Sequence
  HER2-specific CDRH2
DVNPNSGGSIYNQRFK

SEQ ID NO: 128 - protein, 9 aa, Artificial Sequence
  HER2-specific CDRH3
LGPSFYFDY

SEQ ID NO: 129 - protein, 15 aa, Artificial Sequence
  PD-L1-specific CDRL1
RASKGVSTSGYSYLH

SEQ ID NO: 130 - protein, 7 aa, Artificial Sequence
  PD-L1-specific CDRL2
LASYLES

SEQ ID NO: 131 - protein, 9 aa, Artificial Sequence
  PD-L1-specific CDRL3
QHSRDLPLT

SEQ ID NO: 132 - protein, 5 aa, Artificial Sequence
  PD-L1-specific CDRH1
NYYMY

SEQ ID NO: 133 - protein, 17 aa, Artificial Sequence
  PD-L1-specific CDRH2
GINPSNGGTNFNEKFKN

SEQ ID NO: 134 - protein, 11 aa, Artificial Sequence
  PD-L1-specific CDRH3
RDYRFDMGFDY

SEQ ID NO: 135 - protein, 120 aa, Artificial Sequence
  Avelumab variable heavy chain
EVQLLESGGGLVQPGGSLRLSCAASGFTFSSYIMMWVRQAPGKGLEWVSSIYPSGGITFYADTVKGRFTISRDNSKNTLYLQMNSLRAEDTAVYYCARIKLGTVTTVDYWGQGTLVTVSS

SEQ ID NO: 136 - protein, 110 aa, Artificial Sequence
  Avelumab variable light chain
QSALTQPASVSGSPGQSITISCTGTSSDVGGYNYVSWYQQHPGKAPKLMIYDVSNRPSGVSNRFSGSKSGNTASLTISGLQAEDEADYYCSSYTSSSTRVFGTGTKVTVL

SEQ ID NO: 137 - protein, 11 aa, Artificial Sequence
  Avelumab-specific CDRH1
SGFTFSSYIMM

SEQ ID NO: 138 - protein, 17 aa, Artificial Sequence
  Avelumab-specific CDRH2
SIYPSGGITFYADTVKG

SEQ ID NO: 139 - protein, 11 aa, Artificial Sequence
  Avelumab-specific CDRH3
IKLGTVTTVDY

SEQ ID NO: 140 - protein, 14 aa, Artificial Sequence
  Avelumab-specific CDRL1
TGTSSDVGGYNYVS

SEQ ID NO: 141 - protein, 7 aa, Artificial Sequence
  Avelumab-specific CDRL2
DVSNRPS

SEQ ID NO: 142 - protein, 10 aa, Artificial Sequence
  Avelumab-specific CDRL3
SSYTSSSTRV

SEQ ID NO: 143 - protein, 118 aa, Artificial Sequence [sequence omitted]

SEQ ID NO: 144 - protein, 107 aa, Artificial Sequence [sequence omitted]

SEQ ID NO: 145 - protein, 11 aa, Artificial Sequence
  Atezolizumab-specific CDRH1
SGFTFSDSWIH

SEQ ID NO: 146 - protein, 17 aa, Artificial Sequence
  Atezolizumab-specific CDRH2
WISPYGGSTYYADSVKG

SEQ ID NO: 147 - protein, 9 aa, Artificial Sequence
  Atezolizumab-specific CDRH3
RHWPGGFDY

SEQ ID NO: 148 - protein, 11 aa, Artificial Sequence
  Atezolizumab-specific CDRL1
RASQDVSTAVA

SEQ ID NO: 149 - protein, 7 aa, Artificial Sequence
  Atezolizumab-specific CDRL2
SASFLYS

SEQ ID NO: 150 - protein, 9 aa, Artificial Sequence
  Atezolizumab-specific CDRL3
QQYLYHPAT

SEQ ID NO: 151 - protein, 11 aa, Artificial Sequence
  PSMA-specific CDRL1
KASQDVGTAVD

SEQ ID NO: 152 - protein, 7 aa, Artificial Sequence
  PSMA-specific CDRL2
WASTRHT

SEQ ID NO: 153 - protein, 9 aa, Artificial Sequence
  PSMA-specific CDRL3
QQYNSYPLT

SEQ ID NO: 154 - protein, 10 aa, Artificial Sequence
  PSMA-specific CDRH1
GYTFTEYTIH

SEQ ID NO: 155 - protein, 17 aa, Artificial Sequence
  PSMA-specific CDRH2
NINPNNGGTTYNQKFED

SEQ ID NO: 156 - protein, 6 aa, Artificial Sequence
  PSMA-specific CDRH3
GWNFDY

SEQ ID NO: 157 - protein, 7 aa, Artificial Sequence
  MUC16-specific CDRL1
SEDIYSG

SEQ ID NO: 158 - protein, 8 aa, Artificial Sequence
  MUC16-specific CDRL3
GYSYSSTL

SEQ ID NO: 159 - protein, 7 aa, Artificial Sequence
  MUC16-specific CDRH1
TLGMGVG

SEQ ID NO: 160 - protein, 16 aa, Artificial Sequence
  MUC16-specific CDRH2
HIWWDDDKYYNPALKS

SEQ ID NO: 161 - protein, 12 aa, Artificial Sequence
  MUC16-specific CDRH3
IGTAQATDALDY

SEQ ID NO: 162 - protein, 15 aa, Artificial Sequence
  FOLR-specific CDRL1
KASQSVSFAGTSLMH

SEQ ID NO: 163 - protein, 7 aa, Artificial Sequence
  FOLR-specific CDRL2
RASNLEA

SEQ ID NO: 164 - protein, 9 aa, Artificial Sequence
  FOLR-specific CDRL3
QQSREYPYT

SEQ ID NO: 165 - protein, 5 aa, Artificial Sequence
  FOLR-specific CDRH1
GYFMN

SEQ ID NO: 166 - protein, 17 aa, Artificial Sequence
  FOLR-specific CDRH2
RIHPYDGDTFYNQKFQG

SEQ ID NO: 167 - protein, 9 aa, Artificial Sequence
  FOLR-specific CDRH3
YDGSRAMDY

SEQ ID NO: 168 - protein, 119 aa, Artificial Sequence
  Amatuximab-specific variable heavy chain
QVQLQQSGPELEKPGASVKISCKASGYSFTGYTMNWVKQSHGKSLEWIGLITPYNGASSYNQKFRGKATLTVDKSSSTAYMDLLSLTSEDSAVYFCARGGYDGRGFDYWGSGTPVTVSS

SEQ ID NO: 169 - protein, 106 aa, Artificial Sequence
  Amatuximab-specific variable light chain
DIELTQSPAIMSASPGEKVTMTCSASSSVSYMHWYQQKSGTSPKRWIYDTSKLASGVPGRFSGSGSGNSYSLTISSVEAEDDATYYCQQWSKHPLTFGSGTKVEIK

SEQ ID NO: 170 - protein, 10 aa, Artificial Sequence
  Amatuximab-specific CDRH1
GYSFTGYTMN

SEQ ID NO: 171 - protein, 13 aa, Artificial Sequence
  Amatuximab-specific CDRH2
LITPYNGASSYNQ

SEQ ID NO: 172 - protein, 10 aa, Artificial Sequence
  Amatuximab-specific CDRH3
GGYDGRGFDY

SEQ ID NO: 173 - protein, 10 aa, Artificial Sequence
  Amatuximab-specific CDRL1
SASSSVSYMH

SEQ ID NO: 174 - protein, 7 aa, Artificial Sequence
  Amatuximab-specific CDRL2
DTSKLAS

SEQ ID NO: 175 - protein, 9 aa, Artificial Sequence
  Amatuximab-specific CDRL3
QQWSKHPLT

SEQ ID NO: 176 - protein, 32 aa, Artificial Sequence
  Nef (66-97)
VGFPVTPQVPLRPMTYKAAVDLSHFLKEKGGL

SEQ ID NO: 177 - protein, 30 aa, Artificial Sequence
  Nef (116-145)
HTQGYFPDWQNYTPGPGVRYPLTFGWLYKL

SEQ ID NO: 178 - protein, 19 aa, Artificial Sequence
  Gag p17 (17-35)
EKIRLRPGGKKKYKLKHIV

SEQ ID NO: 179 - protein, 32 aa, Artificial Sequence
  Gag p17-p24 (253-284)
NPPIPVGEIYKRWIILGLNKIVRMYSPTSILD

SEQ ID NO: 180 - protein, 31 aa, Artificial Sequence
  Pol 325-355 (RT 158-188)
AIFQSSMTKILEPFRKQNPDIVIYQYMDDLY

SEQ ID NO: 181 - protein, 11 aa, Artificial Sequence
  IgG4 linker
ESKYGPPCPPC

SEQ ID NO: 182 - protein, 11 aa, Artificial Sequence
  CD28 linker
PSPLFPGPSKP

SEQ ID NO: 183 - protein, 5 aa, Artificial Sequence
  spacer
  MISC_FEATURE (1)..(5): Residues (GGGGS) can be repeated n times, wherein n is an integer including, 1, 2, 3, 4, 5, 6, 7, 8, 9, or more
GGGGS

SEQ ID NO: 184 - protein, 5 aa, Artificial Sequence
  spacer
  MISC_FEATURE (1)..(5): (EAAAK) can be repeated n times, wherein n is an integer including 1, 2, 3, 4, 5, 6, 7, 8, 9, or more
EAAAK

SEQ ID NO: 185 - DNA, 21531 bp, Homo sapiens
gatctctatcccctcctgttttctctacgttatttatatgggtatcatcaccatcctggacaacatcaggacagatatccctcaccaagccaatgttcctctctatgttggctcaaatgtccttgaactttcctttcaccaccctttccacagtcaaaaggatattgtagtttaatgcctcagagttcagcttttaagcttctgacaaattattcttcctctttaggttctcctttatggaatcttctgtactgatggccatgtcctttaactactatgtagatatctgctactacctgtattatgcctctacctttattagcagagttatctgtactgttggcatgacaatcatttgttaatatgacttgcctttcctttttctgctattcttgatcaaatggctcctctttcttgctcctctcatttctcctgccttcacttggacgtgcttcacgtagtctgtgcttatgactggattaaaaattgatatggacttatcctaatgttgttcgtcataatatgggttttatggtccattattatttcctatgcattgatctggagaaggcttcaatccttttactctttgtggaaaatatctgtaaaccttctggttcactctgctatagcaatttcagtttaggctagtaagcatgaggatgcctccttctctgatttttcccacagtctgttggtcacagaataacctgagtgattactgatgaaagagtgagaatgttattgatagtcacaatgacaaaaaacaaacaactacagtcaaaatgtttctctttttattagtggattatatttcctgacctatatctggcaggactctttagagaggtagctgaagctgctgttatgaccactagagggaagaagatacctgtggagctaatggtccaagatggtggagccccaagcaaggaagttgttaaggagcccttttgattgaaggtgggtgcccccaccttacagggacaggacatctggatactcctcccagtttctccagtttccctttttcctaatatatctcctgataaaatgtctatactcacttccccatttctaataataaagcaaaggctagttagtaagacatcaccttgcattttgaaaatgccatagactttcaaaattatttcatacatcggtctttctttatttcaagagtccagaaatggcaacattacctttgattcaatgtaatggaaagagctctttcaagagacagagaaaagaataatttaatttctttccccacacctccttccctgtctcttaccctatcttccttccttctaccctccccatttctctctctcatttctcagaagtatattttgaaaggattcatagcagacagctaaggctggttttttctaagtgaagaagtgatattgagaaggtagggttgcatgagccctttcagttttttagtttatatacatctgtattgttagaatgttttataatataaataaaattatttctcagttatatactagctatgtaacctgtggatatttccttaagtattacaagctatacttaactcacttggaaaactcaaataaatacctgcttcatagttattaataaggattaagtgagataatgcccataagattcctattaataacagataaatacatacacacacacacacattgaaaggattcttactttgtgctaggaactataataagttcattgatgcattatatcattaagttctaatttcaacactagaaggcaggtattatctaaatttcatactggatacctccaaactcataaagataattaaattgccttttgtcatatatttattcaaaagggtaaactcaaactatggcttgtctaattttatatatcaccctactgaacatgaccctattgtgatattttataaaattattctcaagttattatgaggatgttgaaagacagagaggatggggtgctatgccccaaatcagcctcacaattaagctaagcagctaagagtcttgcagggtagtgtagggaccacagggttaagggggcagtagaattatactcccactttagtttcatttcaaacaatccatacacacacagccctgagcacttacaaattatactacgctctatactttttgtttaaatgtataaataagtggatgaaagaatagatagatagatagacagatagatgatagatagaataaatgcttgccttcatagctgtctccctaccttgttcaaaatgttcctgtccagaccaaagtaccttgccttcacttaagtaatcaattcctaggttatattctgatgtcaaaggaagtcaaaagatgtgaaaaacaatttctgacccacaactcatgctttgtagatgactagatcaaaaaatttcagccatatcttaacagtgagtgaacaggaaatctcctcttttccctacatctgagatcccagcttctaagaccttcaattctcactcttgatgcaacagaccttggaagcatacaggagagctgaacttggtcaacaaaggagaaaagtttgttggcctccaaaggcacagctcaaacttttcaagccttctctaatcttaaaggtaaacaagggtctcatttctttgagaacttcagggaaaatagacaaggacttgcctggtgcttttggtaggggagcttgcactttccccctttctggaggaaatatttatccccaggtagttccctttttgcaccagtggttctttgaagagacttccacctgggaacagttaaacagcaactacagggccttgaactgcacactttcagtccggtcctcacagttgaaaagacctaagcttgtgcctgatttaagcctttttggtcataaaacattgaattctaatctccctctcaaccctacagtcacccatttggtatattaaagatgtgttgtctactgtctagtatccctcaagtagtgtcaggaattagtcatttaaatagtctgcaagccaggagtggtggctcatgtctgtaattccagcacttgagaggtagaagtgggaggactgcttgagctcaagagtttgatattatcctggacaacatagcaagacctcgtctctacttaaaaaaaaaaaaaaaattagccaggcatgtgatgtacacctgtagtcccagctactcaggaggccgaaatgggaggatcccttgagctcaggaggtcaaggctgcagtgagacatgatcttgccactgcactccagcctggacagcagagtgaaaccttgcctcacgaaacagaatacaaaaacaaacaaacaaaaaactgctccgcaatgcgcttccttgatgctctaccacataggtctgggtactttgtacacattatctcattgctgttcataattgttagattaattttgtaatattgatattattcctagaaagctgaggcctcaagatgataacttttattttctggacttgtaatagctttctcttgtattcaccatgttgtaactttcttagagtagtaacaatataaagttattgtgagtttttgcaaacacagcaaacacaacgacccatatagacattgatgtgaaattgtctattgtcaatttatgggaaaacaagtatgtactttttctactaagccattgaaacaggaataacagaacaagattgaaagaatacattttccgaaattacttgagtattatacaaagacaagcacgtggacctgggaggagggttattgtccatgactggtgtgtggagacaaatgcaggtttataatagatgggatggcatctagcgcaatgactttgccatcacttttagagagctcttggggaccccagtacacaagaggggacgcagggtatatgtagacatctcattctttttcttagtgtgagaataagaatagccatgacctgagtttatagacaatgagcccttttctctctcccactcagcagctatgagatggcttgccctgcctctctactaggctgactcactccaaggcccagcaatgggcagggctctgtcagggctttgatagcactatctgcagagccagggccgagaaggggtggactccagagactctccctcccattcccgagcagggtttgcttatttatgcatttaaatgatatatttattttaaaagaaataacaggagactgcccagccctggctgtgacatggaaactatgtagaatattttgggttccatttttttttccttctttcagttagaggaaaaggggctcactgcacatacactagacagaaagtcaggagctttgaatccaagcctgatcatttccatgtcatactgagaaagtccccacccttctctgagcctcagtttctctttttataagtaggagtctggagtaaatgatttccaatggctctcatttcaatacaaaatttccgtttattaaatgcatgagcttctgttactccaagactgagaaggaaattgaacctgagactcattgactggcaagatgtccccagaggctctcattcagcaataaaattctcaccttcacccaggcccactgagtgtcagatttgcatgcactagttcacgtgtgtaaaaaggaggatgcttctttcctttgtattctcacatacctttaggaaagaacttagcacccttcccacacagccatcccaataactcatttcagtgactcaacccttgactttataaaagtcttgggcagtatagagcagagattaagagtacagatgctggagccagaccacctgagtgattagtgactcagtttctcttagtagttgtatgactcagtttcttcatctgtaaaatggagggttttttaattagtttgtttttgagaaagggtctcactctgtcacccaaatgggagtgtagtggcaaaatctcggctcactgcaacttgcacttcccaggctcaagcggtcctcccacctcaacatcctgagtagctggaaccacaggtacacaccaccatacctcgctaattttttgtatttttggtagagatggggtttcacatgttacacaggatggtctcagactccggagctcaagcaatctgcccacctcagccttccaaagtgctgggattataagcatgattacaggagttttaacaggctcataagattgttctgcagcccgagtgagttaatacatgcaaagagtttaaagcagtgacttataaatgctaactactctagaaatgtttgctagtattttttgtttaactgcaatcattcttgctgcaggtgaaaactagtgttctgtactttatgcccattcatctttaactgtaataataaaaataactgacatttattgaaggctatcagagactgtaattagtgctttgcataattaatcatatttaatactcttggattctttcaggtagatactattattatccccattttactacagttaaaaaaactacctctcaacttgctcaagcatacactctcacacacacaaacataaactactagcaaatagtagaattgagatttggtcctaattatgtctttgctcactatccaataaatatttattgacatgtacttcttggcagtctgtatgctggatgctggggatacaaagatgtttaaatttaagctccagtctctgcttccaaaggcctcccaggccaagttatccattcagaaagcattttttactctttgcattccactgtttttcctaagtgactaaaaaattacactttattcgtctgtgtcctgctctgggatgatagtctgactttcctaacctgagcctaacatccctgacatcaggaaagactacaccatgtggagaaggggtggtggttttgattgctgctgtcttcagttagatggttaactttgtgaagttgaaaactgtggctctctggttgactgttagagttctggcacttgtcactatgcctattatttaacaaatgcatgaatgcttcagaatatgggaatattatcttctggaatagggaatcaagttatattatgtaacccaggattagaagattcttctgtgtgtaagaatttcataaacattaagctgtctagcaaaagcaagggcttggaaaatctgtgagctcctcaccatatagaaagcttttaacccatcattgaataaatccctataggggatttctaccctgagcaaaaggctggtcttgattaattcccaaactcatatagctctgagaaagtctatgctgttaacgttttcttgtctgctaccccatcatatgcacaacaataaatgcaggcctaggcatgactgaaggctctctcataattcttggttgcatgaatcagattatcaacagaaatgttgagacaaactatggggaagcagggtatgaaagagctctgaatgaaatggaaaccgcaatgcttcctgcccattcagggctccagcatgtagaaatctggggctttgtgaagactggcttaaaatcagaagccccattggataagagtagggaagaacctagagcctacgctgagcaggtttccttcatgtgacagggagcctcctgccccgaacttccagggatcctctcttaagtgtttcctgctggaatctcctcacttctatctggaaatggtttctccacagtccagcccctggctagttgaaagagttacccatgcagaggccctcctagcatccagagactagtgcttagattcctactttcagcgttggacaacctggatccacttgcccagtgttcttccttagttcctaccttcgaccttgatcctcctttatcttcctgaaccctgctgagatgatctatgtggggagaatggcttctttgagaaacatcttcttcgttagtggcctgcccctcattcccactttaatatccagaatcactataagaagaatataataagaggaataactcttattataggtaagggaaaattaagaggcatacgtgatgggatgagtaagagaggagagggaaggattaatggacgataaaatctactactatttgttgagaccttttatagtctaatcaattttgctattgttttccatcctcacgctaactccataaaaaaacactattattatctttattttgccatgacaagactgagctcagaagagtcaagcatttgcctaaggtcggacatgtcagaggcagtgccagacctatgtgagactctgcagctactgctcatgggccctgtgctgcactgatgaggaggatcagatggatggggcaatgaagcaaaggaatcattctgtggataaaggagacagccatgaagaagtctatgactgtaaatttgggagcaggagtctctaaggacttggatttcaaggaattttgactcagcaaacacaagaccctcacggtgactttgcgagctggtgtgccagatgtgtctatcagaggttccagggagggtggggtggggtcagggctggccaccagctatcagggcccagatgggttataggctggcaggctcagataggtggttaggtcaggttggtggtgctgggtggagtccatgactcccaggagccaggagagatagaccatgagtagagggcagacatgggaaaggtgggggaggcacagcatagcagcatttttcattctactactacatgggactgctcccctatacccccagctaggggcaagtgccttgactcctatgttttcaggatcatcatctataaagtaagagtaataattgtgtctatctcatagggttattatgaggatcaaaggagatgcacactctctggaccagtggcctaacagttcaggacagagctatgggcttcctatgtatgggtcagtggtctcaatgtagcaggcaagttccagaagatagcatcaaccactgttagagatatactgccagtctcagagcctgatgttaatttagcaatgggctgggaccctcctccagtagaaccttctaaccagctgctgcagtcaaagtcgaatgcagctggttagactttttttaatgaaagcttagctttcattaaagattaagctcctaagcagggcacagatgaaattgtctaacagcaactttgccatctaaaaaaatctgacttcactggaaacatggaagcccaaggttctgaacatgagaaatttttaggaatctgcacaggagttgagagggaaacaagatggtgaagggactagaaaccacatgagagacacgaggaaatagtgtagatttaggctggaggtaaatgaaagagaagtgggaattaatacttactgaaatctttctatatgtcaggtgccattttatgatatttaataatctcattacatatggtaattctgtgagatatgtattattgaacatactataattaatactaatgataagtaacacctcttgagtacttagtatatgctagaatcaaatttaagtttatcatatgaggccgggcacggtggctcatatatgggattacatgcctgtaatcccagcactttgggaggccaaggcaattggatcacctgaggtcaggagttccagaccagcctggccaacatggtgaaaccccttctctactaaaaaatacaaaaaatcagccaggtgtggtggcacgcgtctataatcccagctactcaggaggctgaggcaggagaatcacttgaacccaggaggtggaggttgcagtgagctaagattgcaccactgcactccagcctaggcgacagagtgagactccatctcaaaaaaaaaaaaagaagtttattatatgaattaacttagttttactcacaccaatactcagaagtagattattacctcatttattgatgaggagcccaatgtacttgtagtgtagatcaacttattgaaagcacaagctaataagtagacaattagtaattagaagtcagatggtctgagctctcctactgtctacattacatgagctcttattaactggggactcgaaaatcaaagacatgaaataatttgtccaagcttacagaaccaccaagtagtaaggctaggatgtagacccagttctgctacctctgaagacagtgttttttccacagcaaaacacaaactcagatattgtggatgcgagaaattagaagtagatattcctgccctgtggcccttgcttcttacttttacttcttgtcgattggaagttgtggtccaagccacagttgcagaccatacttcctcaaccataattgcatttcttcaggaaagtttgagggagaaaaaggtaaagaaaaatttagaaacaacttcagaataaagagattttctcttgggttacagagattgtcatatgacaaattataagcagacacttgagaaaactgaaggcccatgcctgcccaaattaccctttgaccccttggtcaagctgcaactttggttaaagggagtgtttatgtgttatagtgttcatttactcttctggtctaacccattggctccgtcttcatcctgcagtgacctcagtgcctcagaaacatacatatgtttgtctagtttaagtttgtgtgaaattctaactagcgtcaagaactgagggccctaaactatgctaggaatagtgctgtggtgctgtgataggtacacaagaaatgagaagaaactgcagattctctgcatctccctttgccgggtctgacaacaaagtttccccaaattttaccaatgcaagccatttctccatatgctaactactttaaaatcatttggggcttcacattgtctttctcatctgtaaaaagaatggaagaactcattcctacagaactccctatgtcttccctgatgggctagagttcctctttctcaaaaattagccattattgtatttccttctaagccaaagctcagaggtcttgtattgcccagtgacatgcacactggtcaaaagtaggctaagtagaagggtactttcacaggaacagagagcaaaagaggtgggtgaatgagagggtaagtgagaaaagacaaatgagaagttacaacatgatggcttgttgtctaaatatctcctagggaattattgtgagaggtctgaatagtgttgtaaaataagctgaatctgctgccaacattaacagtcaagaaatacctccgaataactgtacctccaattattctttaaggtagcatgcaactgtaatagttgcatgtatatatttatcataatactgtaacagaaaacacttactgaatatatactgtgtccctagttctttacacaataaactaatctcatcctcataattctattagctaatacatattatcatcctatatttcagagacttcaagaagttaagcaacttgctcaagatcatctaagaagtaggtggtatttctgggctcatttggcccctcctaatctctcatggcaacatggctgcctaaagtgttgattgccttaattcatcagggatgggctcatactcactgcagaccttaactggcatcctcttttcttatgtgatctgcctgaccctagtagacttatgaaatttctgatgagaaaggagagaggagaaaggcagagctgactgtgatgagtgatgaaggtgccttctcatctgggtaccagtggggcctctaagactaagtcactctgtctcactgtgtcttagccagttccttacagcttgccctgatgggagatagagaatgggtatcctccaacaaaaaaataaattttcatttctcaaggtccaacttatgttttcttaatttttaaaaaaatcttgaccattctccactctctaaaataatccacagtgagagaaacattcttttcccccatcccataaatacctctattaaatatggaaaatctgggcatggtgtctcacacctgtaatcccagcactttgggaggctgaggtgggtggactgcttggagctcaggagttcaagaccatcttggacaacatggtgataccctgcctctacaaaaagtacaaaaattagcctggcatggtggtgtgcacctgtaatcccagctattagggtggctgaggcaggagaattgcttgaacccgggaggcggaggttgcagtgagctgagatcgtgccactgcactccagcctgggggacagagcacattataattaactgttattttttacttggactcttgtggggaataagatacatgttttattcttatttatgattcaagcactgaaaatagtgtttagcatccagcaggtgcttcaaaaccatttgctgaatgattactatactttttacaagctcagctccctctatcccttccagcatcctcatctctgattaaataagcttcagtttttccttagttcctgttacatttctgtgtgtctccattagtgacctcccatagtccaagcatgagcagttctggccaggcccctgtcggggtcagtgccccacccccgccttctggttctgtgtaaccttctaagcaaaccttctggctcaagcacagcaatgctgagtcatgatgagtcatgctgaggcttagggtgtgtgcccagatgttctcagcctagagtgatgactcctatctgggtccccagcaggatgcttacagggcagatggcaaaaaaaaggagaagctgaccacctgactaaaactccacctcaaacggcatcataaagaaaatggatgcctgagacagaatgtgacatattctagaatatattatttcctgaatatatatatatatatacacatatacgtatatatatatatatatatatatttgttgttatcaattgccatagaatgattagttattgtgaatcaaatatttatcttgcaggtggcctctatacctagaagcggcagaatcaggctttattaatacatgtgtatagatttttaggatctatacacatgtattaatatgaaacaaggatatggaagaggaaggcatgaaaacaggaaaagaaaacaaaccttgtttgccattttaaggcacccctggacagctaggtggcaaaaggcctgtgctgttagaggacacatgctcacatacggggtcagatctgacttggggtgctactgggaagctctcatcttaaggatacatctcaggccagtcttggtgcattaggaagatgtaggcaactctgatcctgagaggaaagaaacattcctccaggagagctaaaagggttcacctgtgtgggtaactgtgaaggactacaagaggatgaaaaacaatgacagacagacataatgcttgtgggagaaaaaacaggaggtcaaggggatagagaaggcttccagaagaatggctttgaagctggcttctgtaggagttcacagtggcaaagatgtttcagaaatgtgacatgacttaaggaactatacaaaaaggaacaaatttaaggagaggcagataaattagttcaacagacatgcaaggaattttcagatgaatgttatgtctccactgagcttcttgaggttagcagctgtgagggttttgcaggcccaggacccattacaggacctcacgtatacttgacactgttttttgtattcatttgtgaatgaatgacctcttgtcagtctactcggtttcgctgtgaatgaatgatgtcttgtcagcctacttggtttcgctaagagcacagagagaagatttagtgatgctatgtaaaaacttcctttttggttcaagtgtatgtttgtgatagaaatgaagacaggctacatgatgcatatctaacataaacacaaacattaagaaaggaaatcaacctgaagagtatttatacagataacaaaatacagagagtgagttaaatgtgtaataactgtggcacaggctggaatatgagccatttaaatcacaaattaattagaaaaaaaacagtggggaaaaaattccatggatgggtctagaaagactagcattgttttaggttgagtggcagtgtttaaagggtgatatcagactaaacttgaaatatgtggctaaataactagaatactctttattttttcgtatcatgaatagcagatatagcttgatggccccatgcttggtttaacatccttgctgttcctgacatgaaatccttaatttttgacaaaggggctattcattttcattttatattgggcctagaaattatgtagatggtcctgaggaaaagtttatagcttgtctatttctctctctaacatagttgtcagcacaatgcctaggctataggaagtactcaaagcttgttaaattgaattctatccttcttattcaattctacacatggaggaaaaactcatcagggatggaggcacgcctctaaggaaggcaggtgtggctctgcagtgtgattgggtacttgcaggacgaagggtggggtgggagtggctaaccttccattcctagtgcagaggtcacagcctaaacatcaaattccttgaggtgcggtggctcactcctgtaatcacagcagtttgggacgccaaggtgggcagatcacttgaggtcaggagttggacaccagcccagccaacatagtgaaacctggtctctgcttaaaaatataaaaattagctggacgtggtgacgggagcctgtaatccaactacttgggaggctgaggcaggagaatcgcttgaaccggggaggtggagtttgcactgagcagagatcatgccattgcactccagcctccagagcgagactctgtctaaagaaaaacgaaaacaaacaaacaaacaaacaaacaaaacccatcaaattccctgaccgaacagaattctgtctgattgttctctgacttatctaccattttccctccttaaagaaactgtgaacttccttcagctagaggggcctggctcagaagcctctggtcagcatccaagaaatacttgatgtcactttggctaaaggtatgatgtgtagacaagctccagagatggtttctcatttccatatccacccacccagctttccaattttaaagccaattctgaggtagagactgtgatgaacaaacaccttgacaaaattcaacccaaagactcactttgcctagcttcaaaatccttactctgacatatactcacagccagaaattagcatgcactagagtgtgcatgagtgcaacacacacacacaccaattccatattctctgtcagaaaatcctgttggtttttcgtgaaaggatgttttcagaggctgaccccttgccttcacctccaatgctaccactctggtctaagtcactgtcaccaccacctaaattatagctgttgactcataacaatcttcctgcttctaccactgccccactacaatttcttcccaatatactatccaaattagtcttttcaaaatgtaagtcatatatggtcacctctttgttcaaagtcttctgatagtttcctatatcatttataataaaaccaaatccttacaattctctacaatagttgttcatgcatatattatgtttattacagatacatatatatagctctcatataaataaatatatatatttatgtgtatgtgtgtagagtgttttttcttacaactctatgatgtaggtattattagtgtcccaaattttataatttaggacttctatgatctcatcttttattctccccttcaccgaatctcatcctacattggccttattgatattccttgaaaattctaagcatcttacatctttagggtatttacatttgccattccctatgccctaaatatttaatcatagtttcatataaatgggttcctcatcatctatgggtactctctcaggtgttaactttatagtgaggactttcctgccatactacttaaagtagcgataccctttcaccctgtcctaatcacactctggccttcatttcagttttttttttttctccatagcacctaatctcattggtatataacatgtttcatttgcttatttaatgtcaagctctttccactatcaagtccatgaaaacaggaactttattcctctattctgtttttgtgctgtattcttagcaattttacaattttgaatgaatgaatgagcagtcaaacacatatacaactataattaaaaggatgtatgctgacacatccactgctatgcacacacaaagaaatcagtggagtagagctggaagtgctaagcctgcatagagctagttagccctccgcaggcagagccttgatgggattactgagttctagaattggactcatttgttttgtaggctgagatttgctcttgaaaacttgttctgaccaaaataaaaggctcaaaagatgaatatcgaaaccagggtgttttttacactggaatttataactagagcactcatgtttatgtaagcaattaattgtttcatcagtcaggtaaaagtaaagaaaaactgtgccaaggcaggtagcctaatgcaatatgccactaaagtaaacattatttcataggtgtcagatatggcttattcatccatcttcatgggaaggatggccttggcctggacatcagtgttatgtgaggttcaaaacacctctaggctataaggcaacagagctccttttttttttttctgtgctttcctggctgtccaaatctctaatgataagcatacttctattcaatgagaatattctgtaagattatagttaagaattgtgggagccattccgtctcttatagttaaatttgagcttcttttatgatcactgtttttttaatatgctttaagttctggggtacatgtgccatggtggtttgctgcacccatcaacccgtcatctacattaggtatttctcctaatgctatccttcccctagccccccacccccaacaggccccagtgtgtgatgttcccctccctgtgtccatggatcactggtttttttttgttttttttttttttttaaagtctcagttaaatttttggaatgtaatttattttcctggtatcctaggacttgcaagttatctggtcactttagccctcacgttttgatgataatcacatatttgtaaacacaacacacacacacacacacacacacatatatatatatataaaacatatatatacataaacacacataacatatttatcgggcatttctgagcaactaatcatgcaggactctcaaacactaacctatagccttttctatgtatctacttgtgtagaaaccaagcgtggggactgagaaggcaatagcaggagcattctgactctcactgcctttagctaggcccctccctcatcacagctcagcatagtcctgagctcttatctatatccacacacagtttctgacgctgcccagctatcaccatcccaagtctaaagaaaaaaataatgggtttgcccatctctgttgattagaaaacaaaacaaaataaaataagcccctaagctcccagaaaacatgactaaaccagcaagaagaagaaaatacaataggtatatgaggagactggtgacactagtgtctgaatgaggcttgagtacagaaaagaggctctagcagcatagtggtttagaggagatgtttctttccttcacagatgccttagcctcaataagcttgcggttgtggaagtttactttcagaacaaactcctgtggggctagaattattgatggctaaaagaagcccgggggagggaaaaatcattcagcatcctcacccttagtgacacaaaacagagggggcctggttttccatatttcctcatgatggatgatctcgttaatgaaggtggtctgacgagatcattgcttcttccatttaagccttgctcacttgccaatcctcagttttaaccttctccagagaaatacacattttttattcaggaaacatactatgttatagtttcaatactaaataatcaaagtactgaagatagcatgcataggcaagaaaaagtccttagctttatgttgctgttgtttcagaatttaaaaaagatcaccaagtcaaggacttctcagttctagcactagaggtggaatcttagcatataatcagaggtttttcaaaatttctagacataagattcaaagccctgcacttaaaatagtctcatttgaattaactctttatataaattgaaagcacattctgaactacttcagagtattgttttatttctatgttcttagttcataaatacattaggcaatgcaatttaattaaaaaaacccaagaatttcttagaattttaatcatgaaaataaatgaaggcatctttacttactcaaggtcccaaaaggtcaaagaaaccaggaaagtaaagctatatttcagcggaaaatgggatatttatgagttttctaagttgacagactcaagttttaaccttcagtgcccatcatgtaggaaagtgtggcataactggctgattctggctttctactcctttttcccattaaagatccctcctgcttaattaacattcacaagtaactctggttgtactttaggcacagtggctcccgaggtcagtcacacaataggatgtctgtgctccaagttgccagagagagagattactcttgagaatgagcctcagccctggctcaaactcacctgcaaacttcgtgagagatgaggcagaggtacactacgaaagcaacagttagaagctaaatgatgagaacacatggactcatagagggaaacaacgcatactggggcctatcagagggtggagggtgagagaaggagaggatcaggaaaaatcactaatggatgctaagcgtaatacctgagtgatgagatcatctatacaacaaacccccttgacattcatttatctatgtaacaaacctgcacatcctgtacatgtacccctgaacttaaaataaaagttgaaaacaagaaagcaacagtttgaacacttgttatggtctattctctcattctttacaattacactagaaaatagccacaggcttcctgcaaggcagccacagaatttatgacttgtgatatccaagtcattcctggataatgcaaaatctaacacaaaatctagtagaatcatttgcttacatctatttttgttctgagaatatagatttagatacataatggaagcagaataatttaaaatctggctaatttagaatcctaagcagctcttttcctatcagtggtttacaagccttgtttatatttttcctattttaaaaataaaaataaagtaagttatttgtggtaaagaatattcattaaagtatttatttcttagataataccatgaaaaacattcagtgaagtgaagggcctactttacttaacaagaatctaatttatataatttttcatactaatagcatctaagaacagtacaatatttgactcttcaggttaaacatatgtcataaattagccagaaagatttaagaaaatattggatgtttccttgtttaaattaggcatcttacagtttttagaatcctgcatagaacttaagaaattacaaatgctaaagcaaacccaaacaggcaggaattaatcttcatcgaatttgggtgtttctttctaaaagtcctttatacttaaatgtcttaagacatacatagattttattttactaattttaattatatagacaataaatgaatattcttactgattactttttctgactgtctaatctttctgatctatcctggatggccataacacttatctctctgaactttgggcttttaatataggaaagaaaagcaataatccatttttcatggtatctcatatgataaacaaataaaatgcttaaaaatgagcaggtgaagcaatttatcttgaaccaacaagcatcgaagcaataatgagactgcccgcagcctacctgacttctgagtcaggatttataagccttgttactgagacacaaacctgggcctttcaatgctataacctttcttgaagctcctccctaccacctttagccataaggaaacatggaatgggtcagatccctggatgcaagccaggtctggaaccataggcagtaaggagagaagaaaatgtgggctctgcaactggctccgagggagcaggagaggatcaaccccatactctgaatctaagagaagactggtgtccatactctgaatgggaagaatgatgggattacccatagggcttgttttagggagaaacctgttctccaaactcttggccttgagatacctggtccttattccttggactttggcaatgtctgaccctcacattcaagttctgaggaagggccactgccttcatactgtggatctgtagcaaattccccctgaaaacccagagctgtatcttaattggttaaaaaaaattatattatctcaacgactgttcttctctgagtagccaagctcagcttggttcaagctacaagcagctgagctgctttttgtctagtcattgttcttttatttcagtggatcaaatacgttctttccaaacctaggatcttgtcttcctaggctatatattttgtcccaggaagtcttaatctggggtccacagaacactagggggctggtgaagtttatagaaaaaaaatctgtatttttacttacatgtaactgaaatttagcattttcttctactttgaatgcaaaggacaaactagaatgacatcatcagtacctattgcatagttataaagagaaaccacagatattttcatactacaccataggtattgcagatctttttgtttttgtttttgtttgagatggagtttcgctcttattgcccaggctggagtgcagtggcatgatttcggctcactgcaacctccccttcctgcattcaagcaattctcctgccttggcctcctgagtagctggggattacaggcacctgccaccatgccagtctaatttttgtatttttagtagagatggggtttcgccatgttggccaggctggtcttgaactcctgacctcagatgatctgcccgccttggcctcctgaagtgctgggattataggtgtgagccaccacgcctggcccattgcagatatttttaattcacatttatctgcatcactacttggatcttaaggtagctgtagacccaatcctagatctaatgctttcataaagaagcaaatataataaatactataccacaaatgtaatgtttgatgtctgataatgatatttcagtgtaattaaacttagcactcctatgtatattatttgatgcaataaaaacatatttttttagcacttacagtctgccaaactggcctgtgacacaaaaaaagtttaggaattcctggttttgtctgtgttagccaatggttagaatatatgctcagaaagataccattggttaatagctaaaagaaaatggagtagaaattcagtggcctggaataataacaatttgggcagtcattaagtcaggtgaagacttctggaatcatgggagaaaagcaagggagacattcttacttgccacaagtgtttttttttttttttttttttatcacaaacataagaaaatataataaataacaaagtcaggttatagaagagagaaacgctcttagtaaacttggaatatggaatccccaaaggcacttgacttgggagacaggagccatactgctaagtgaaaaagacgaagaacctctagggcctgaacatacaggaaattgtaggaacagaaattcctagatctggtggggcaaggggagccataggagaaagaaatggtagaaatggatggagacggaggcagaggtgggcagatcatgaggtcaagagatcgagaccatcctggcaaacatggtgaaatcccgtctctactaaaaataaaaaaattagctgggcatggtggcatgcgcctgtagtcccagctgctcgggaggctgaggcaggagaatcgtttgaacccaggaggcgaaggttgcagtgagctgagatagtgccattgcactccagtctggcaacagagtgagactccgtctcaaaaaaaaaaaaaaaagaaagaaagaaaagaaaaagaaaaaagaaaaaataaatggatgtagaacaagccagaaggaggaactgggctggggcaatgagattatggtgatgtaagggacttttatagaattaacaatgctggaatttgtggaactctgcttctattattcccccaatcattacttctgtcacattgatagttaaataatttctgtgaatttattccttgattctaaaatatgaggataatgacaatggtattataagggcagattaagtgatatagcatgagcaatattcttcaggcacatggatcgaattgaatacactgtaaatcccaacttccagtttcagctctaccaagtaaagagctagcaagtcatcaaaatggggacatacagaaaaaaaaaaggacactagaggaataatataccctgactcctagcctgattaatatatcgat

SEQ ID NO: 186 - DNA, 1614 bp, Homo sapiens
gatctctatttatttagcaataatagagaaagcatttaagagaataaagcaatggaaataagaaatttgtaaatttccttctgataactagaaatagaggatccagtttcttttggttaacctaaattttatttcattttattgttttattttattttattttattttattttgtgtaatcgtagtttcagagtgttagagctgaaaggaagaagtaggagaaacatgcaaagtaaaagtataacactttccttactaaaccgacatgggtttccaggtaggggcaggattcaggatgactgacagggcccttagggaacactgagaccctacgctgacctcataaatgcttgctacctttgctgttttaattacatcttttaatagcaggaagcagaactctgcacttcaaaagtttttcctcacctgaggagttaatttagtacaaggggaaaaagtacagggggatgggagaaaggcgatcacgttgggaagctatagagaaagaagagtaaattttagtaaaggaggtttaaacaaacaaaatataaagagaaataggaacttgaatcaaggaaatgattttaaaacgcagtattcttagtggactagaggaaaaaaataatctgagccaagtagaagaccttttcccctcctacccctactttctaagtcacagaggctttttgttcccccagacactcttgcagattagtccaggcagaaacagttagatgtccccagttaacctcctatttgacaccactgattaccccattgatagtcacactttgggttgtaagtgactttttatttatttgtatttttgactgcattaagaggtctctagttttttatctcttgtttcccaaaacctaataagtaactaatgcacagagcacattgatttgtatttattctatttttagacataatttattagcatgcatgagcaaattaagaaaaacaacaacaaatgaatgcatatatatgtatatgtatgtgtgtatatatacacacatatatatatatattttttcttttcttaccagaaggttttaatccaaataaggagaagatatgcttagaaccgaggtagagttttcatccattctgtcctgtaagtattttgcatattctggagacgcaggaagagatccatctacatatcccaaagctgaattatggtagacaaaactcttccacttttagtgcatcaacttcttatttgtgtaataagaaaattgggaaaacgatcttcaatatgcttaccaagctgtgattccaaatattacgtaaatacacttgcaaaggaggatgtttttagtagcaatttgtactgatggtatggggccaagagatatatcttagagggagggctgagggtttgaagtccaactcctaagccagtgccagaagagccaaggacaggtacggctgtcatcacttagacctcaccctgtggagccacaccctagggttggccaatctactcccaggagcagggagggcaggagccagggctgggcataaaagtcagggcagagccatctattgcttacatttgcttctgacacaactgtgttcactagcaacctcaaacagacaccatgg

SEQ ID NO: 187 - DNA, 55 bp, Artificial Sequence
  CD33 shRNA
tgttcatacttctttcggatttcaagagaatccgaaagaagtatgaacttttttc

SEQ ID NO: 188 - DNA, 55 bp, Artificial Sequence
  CD33 shRNA
tggagagaggaagtaccaaattcaagagatttggtacttcctctctccttttttc

SEQ ID NO: 189 - DNA, 22 bp, Artificial Sequence
  mouse RPL10 forward primer
tgaagacatggttgctgagaag

SEQ ID NO: 190 - DNA, 24 bp, Artificial Sequence
  mouse RPL10 reverse primer
gaacgatttggtagggtataggag

SEQ ID NO: 191 - DNA, 22 bp, Artificial Sequence
  human gamma-globin forward primer
gtggaagatgctggaggagaaa

SEQ ID NO: 192 - DNA, 20 bp, Artificial Sequence
  human gamma-globin reverse primer
tgccatgtgccttgactttg

SEQ ID NO: 193 - DNA, 20 bp, Artificial Sequence
  mouse beta-major globin forward primer
atgccaaagtgaaggcccat

SEQ ID NO: 194 - DNA, 20 bp, Artificial Sequence
  mouse beta-major globin reverse primer
cccagcacaatcacgatcat

SEQ ID NO: 195 - DNA, 22 bp, Artificial Sequence
  human gamma-globin forward primer
gtgcttgaaggggaacaactac

SEQ ID NO: 196 - DNA, 22 bp, Artificial Sequence
  human gamma-globin reverse primer
cctggcctccagataactacac

SEQ ID NO: 197 - DNA, 39 bp, Artificial Sequence
  EF1alpha p1 forward primer
ccccctcgaggtcgacatggctagagacttatcgaaagc

SEQ ID NO: 198 - DNA, 38 bp, Artificial Sequence
  EF1alpha p1 reverse primer
attcgatatcaagctccaagatctgcacactggtattt

SEQ ID NO: 199 - DNA, 39 bp, Artificial Sequence
  EF1alpha p2  forward primer
ccccctcgaggtcgacgtacacgacatcactttcccagt

SEQ ID NO: 200 - DNA, 37 bp, Artificial Sequence
  EF1alpha p2 reverse primer
attcgatatcaagctcacactggtatttcggtttttg

SEQ ID NO: 201 - DNA, 40 bp, Artificial Sequence
  3'HS1 p1 forward primer
ccccctcgaggtcgacctacactctcagtcagcctatgga

SEQ ID NO: 202 - DNA, 39 bp, Artificial Sequence
  3'HS1 p1 reverse primer
attcgatatcaagcttaatcccaaaaggctgatagtctc

SEQ ID NO: 203 - DNA, 40 bp, Artificial Sequence
  3'HS1 p2 forward primer
ccccctcgaggtcgacacatctctcactttctcatcacca

SEQ ID NO: 204 - DNA, 39 bp, Artificial Sequence
  3'HS1 p2 reverse primer
attcgatatcaagctaagtaactgggattacaggagcac

SEQ ID NO: 205 - DNA, 24 bp, Artificial Sequence
  CD46F primer
aaagggcaaataccttaaggggtg

SEQ ID NO: 206 - DNA, 25 bp, Artificial Sequence
  CD46R primer
agcacttcgacctaaaaatagagat

SEQ ID NO: 207 - DNA, 20 bp, Artificial Sequence
  sgRNA
ggggccactagggacaggat

SEQ ID NO: 208 - DNA, 33 bp, Artificial Sequence
  AAVS1 forward primer
atctcacaggtaaaactgacgcacggaggaaca

SEQ ID NO: 209 - DNA, 30 bp, Artificial Sequence
  AAVS1 reverse primer
cgggtcacctctcactcctttcatttgggc

SEQ ID NO: 210 - DNA, 20 bp, Artificial Sequence
  AAVS1 forward primer
cggttaatgtggctctggtt

SEQ ID NO: 211 - DNA, 20 bp, Artificial Sequence
  AAVS1 reverse primer
cctctctggctccatcgtaa

SEQ ID NO: 212 - DNA, 20 bp, Artificial Sequence
  mouse alpha globin forward primer
ctggggaagacaaaagcaac

SEQ ID NO: 213 - DNA, 20 bp, Artificial Sequence
  mouse alpha globin reverse primer
gccgtggcttacatcaaagt

SEQ ID NO: 214 - DNA, 22 bp, Artificial Sequence
  human g-globin forward primer
ggggcaaggtgaatgtggaaga

SEQ ID NO: 215 - DNA, 22 bp, Artificial Sequence
  human g-globin reverse primer
catgatggcagaggcagaggac

SEQ ID NO: 216 - DNA, 21 bp, Artificial Sequence
  human beta-globin forward primer
ctcatggcaagaaagtgctcg

SEQ ID NO: 217 - DNA, 22 bp, Artificial Sequence
  human beta-globin reverse primer
aattctttgccaaagtgatggg

SEQ ID NO: 218 - DNA, 20 bp, Artificial Sequence
  GFP forward primer
tcgtgaccaccctgacctac

SEQ ID NO: 219 - DNA, 20 bp, Artificial Sequence
  GFP reverse primer
ggtcttgtagttgccgtcgt

SEQ ID NO: 220 - DNA, 24 bp, Artificial Sequence
  mgmt forward primer
gctgtctggttgtgagcagggtct

SEQ ID NO: 221 - DNA, 23 bp, Artificial Sequence
  mgmt reverse primer
cgggctggtggaaataggcattc

SEQ ID NO: 222 - DNA, 22 bp, Artificial Sequence
  AAVS1 specific TLA forward primer
ggttgtccagaaaaacggtgat

SEQ ID NO: 223 - DNA, 22 bp, Artificial Sequence
  AAVS1 specific TLA reverse primer
cctctcactcctttcatttggg

SEQ ID NO: 224 - DNA, 42 bp, Artificial Sequence
  EF1a forward primer
aacaaaagctggttaattaaatcggacgggggtagtctcaag

SEQ ID NO: 225 - DNA, 41 bp, Artificial Sequence
  EF1a reverse primer
tattgtaccatcttaattaaaggggcgagtccttttgtatg

SEQ ID NO: 226 - DNA, 46 bp, Artificial Sequence
  pA forward primer
aacaaaagctggttaattaatcattttatgtttcaggttcaggggg

SEQ ID NO: 227 - DNA, 48 bp, Artificial Sequence
  pA reverse primer
tattgtaccatcttaattaaatggttacaaataaagcaatagcatcac

SEQ ID NO: 228 - DNA, 46 bp, Artificial Sequence
  HS4 forward primer
aacaaaagctggttaattaagtttttgtattctgtttcgtgaggca

SEQ ID NO: 229 - DNA, 42 bp, Artificial Sequence
  HS4 reverse primer
tattgtaccatcttaattaagcatttgcctaaggtcggacat

SEQ ID NO: 230 - DNA, 24 bp, Artificial Sequence
  In-Out P1 primer
ccacacccagacctgacccaaacc

SEQ ID NO: 231 - DNA, 24 bp, Artificial Sequence
  In-Out P2 primer
cgggaaccacacacggcacttacc

SEQ ID NO: 232 - DNA, 24 bp, Artificial Sequence
  In-Out P3 primer
tctaacgctgccgtctctctcctg

SEQ ID NO: 233 - DNA, 26 bp, Artificial Sequence
  forward primer for genotyping CD46 mice
gccagttcatcttttgactctattaa

SEQ ID NO: 234 - DNA, 20 bp, Artificial Sequence
  reverse primer for genotyping CD46 mice
aatcacagcaatgacccaaa

SEQ ID NO: 235 - DNA, 23 bp, Artificial Sequence
  32P-gamma-ATP labeled probes for miRNA 423-5p
aaagtctcgctctctgcccctca

SEQ ID NO: 236 - DNA, 37 bp, Artificial Sequence
  32P-gamma-ATP labeled probes for U6 snRNA
gaatttgcgtgtcatccttgcgcaggggccatgctaa

SEQ ID NO: 237 - DNA, 25 bp, Artificial Sequence
  HBG2-seq primer
cttatttggaaaccaatgcttacta

SEQ ID NO: 238 - DNA, 22 bp, Artificial Sequence
  anti-mouse PDL1 forward primer
ggttcagcctggtgggtctttg

SEQ ID NO: 239 - DNA, 24 bp, Artificial Sequence
  anti-mouse PDL1 reverse primer
atctggaggtatgcggtgttcttc

SEQ ID NO: 240 - DNA, 20 bp, Artificial Sequence
  mouse PPIA forward primer
gcatacaggtcctggcatct

SEQ ID NO: 241 - DNA, 20 bp, Artificial Sequence
  mouse PPIA reverse primer
atccagccattcagtcttgg

SEQ ID NO: 242 - DNA, 20 bp, Artificial Sequence
  forward primer for mouse beta-YAC (gamma-globin promoter)
aaacggtccctggctaaact

SEQ ID NO: 243 - DNA, 21 bp, Artificial Sequence
  reverse primer for mouse beta-YAC (gamma-globin promoter)
gctgaagggtgcttccttttt

SEQ ID NO: 244 - DNA, 20 bp, Artificial Sequence
  sgBCL
tttatcacaggctccaggaa

SEQ ID NO: 245 - DNA, 20 bp, Artificial Sequence
  sgBCL
ttttatcacaggctccagga

SEQ ID NO: 246 - DNA, 25 bp, Artificial Sequence
  HBB primer
atgtcagaagcaaatgtgaggagca

SEQ ID NO: 247 - DNA, 20 bp, Artificial Sequence
  forward BCL11A-seq primer
agagagccttccgaaagagg

SEQ ID NO: 248 - DNA, 20 bp, Artificial Sequence
  sgBCL
ctgtgataaaagcaactgtt

SEQ ID NO: 249 - DNA, 20 bp, Artificial Sequence
  sgBCL
gataaaagcaactgttagct

SEQ ID NO: 250 - DNA, 20 bp, Artificial Sequence
  sgHBG
cttgaccaatagccttgaca

SEQ ID NO: 251 - DNA, 23 bp, Artificial Sequence
  HBB primer
aattctggcttatcggaggcaag

SEQ ID NO: 252 - DNA, 20 bp, Artificial Sequence
  sgHBG
gctattggtcaaggcaaggc

SEQ ID NO: 253 - DNA, 20 bp, Artificial Sequence
  sgHBG
gtggggaaggggcccccaag

SEQ ID NO: 254 - DNA, 20 bp, Artificial Sequence
  sgHBG
ccttccccacactatctcaa

SEQ ID NO: 255 - DNA, 20 bp, Artificial Sequence
  sgHBG
agatatttgcattgagatag

SEQ ID NO: 256 - DNA, 20 bp, Artificial Sequence
  sgHBB_STOP
cttgccccacagggcagtaa

SEQ ID NO: 257 - DNA, 20 bp, Artificial Sequence
  sgHBB_SKIP
agactcaccctgaagttctc

SEQ ID NO: 258 - DNA, 20 bp, Artificial Sequence
  sgHBB_CRISPR
cttgtcaaggctattggtca

SEQ ID NO: 259 - DNA, 20 bp, Artificial Sequence
  sgNEG
ggtgtcgaaatgagaagaag

SEQ ID NO: 260 - DNA, 594 bp, Artificial Sequence
  TadAN +32aa
tctgaagtcgagttcagccacgagtattggatgaggcacgcactgaccctggcaaaacgagcctgggacgaaagagaagtccccgtcggcgccgtgctggtgcacaacaatcgcgtgatcggagaaggatggaacaggccaatcggacgccacgaccctaccgcacacgcagagatcatggcactgaggcagggaggactggtcatgcagaattatcgcctgatcgatgccaccctgtatgtgacactggagccatgcgtgatgtgcgcaggagcaatgatccacagccggatcggaagagtggtgttcggagcacgagacgccaagaccggagcagcaggcagcctgatggatgtgctgcaccacccaggcatgaaccaccgggtggagatcacagagggcatcctggcagacgagtgcgccgccctgctgagcgatttctttagaatgaggagacaggagatcaaggcccagaagaaggcacagagctccaccgactctggaggctctagcggaggatcctctggaagcgagacaccaggcacatccgagtccgccacaccagagtcttccggcggctcctccggaggatcc

SEQ ID NO: 261 - DNA, 594 bp, Artificial Sequence
  TadAN+ +32aa
tctgaggtggagttttcccacgagtactggatgagacatgccctgaccctggccaagagggcacgcgatgagagggaggtgcctgtgggagccgtgctggtgctgaacaatagagtgatcggcgagggctggaacagagccatcggcctgcacgacccaacagcccatgccgaaattatggccctgagacagggcggcctggtcatgcagaactacagactgattgacgccaccctgtacgtgacattcgagccttgcgtgatgtgcgccggcgccatgatccactctaggatcggccgcgtggtgtttggcgtgaggaatgcaaaaactggcgccgcaggctctctgatggacgtgctgcactaccccggcatgaatcacagagtcgaaattaccgagggaatcctggcagatgaatgtgccgccctgctgtgctatttctttcggatgcctagacaggtgtttaatgctcagaagaaggcccagagctccaccgatagtggcggatctagcgggggctcctctggctctgagacccctggcacaagcgagagcgcaacacctgaaagcagcgggggcagcagcggggggagc

SEQ ID NO: 262 - DNA, 600 bp, Artificial Sequence
  vector
catcatcaataatataccttattttggattgaagccaatatgataatgagggggtggagtttgtgacgtggcgcggggcgtgggaacggggcgggtgacgtagtagtgtggcggaagtgtgatgttgcaagtgtggcggaacacatgtaagcgacggatgtggcaaaagtgacgtttttggtgtgcgccggtgtacagccctaggataacttcgtatagcatacattatacgaagttatactagtacgcccgggcgtatcgatacgatatcggtccggacaggaagtgacaattttcgcgcggttttaggcggatgttgtagtaaatttgggcgtaaccgagtaagatttggccattttcgcgggaaaactgaataagaggaagtgaaatctgaataattttgtgttactcatagcgcgtaatggatccgcgttaaccggcggccgcattctagacggaattcataacttcgtatagcatacattatacgaagttatgctagccgaagcttgagctcgtcgagggatctgggcgtggttaagggtgggaaagaatatataaggtgggggtcttatgtagttttgtatctgttttgcagca

SEQ ID NO: 263 - DNA, 20 bp, Artificial Sequence
  BCL11A-seq reverse primer
ggcagctagacaggacttgg

SEQ ID NO: 264 - DNA, 370 bp, Adenovirus serotype 35
catcatcaataatataccttatagatggaatggtgccaatatgtaaatgaggtgattttaaaaagtgtgggccgtgtggtgattggctgtggggttaacggttaaaaggggcggcgcggccgtgggaaaatgacgttatttaaatataacttcgtatagcatacattatacgaagttatgaggtagttttgttcaggggcaagtgaaaattgacccattacgcgcgaaaactgaatgaggaagtgtttttctgaataatgtggtatttatggcagggtggagtatttgaccggatccaggtagactttgctgattttcgtggaggtttataacttcgtatagcatacattatacgaagttatatttaaat

SEQ ID NO: 265 - protein, 198 aa, Artificial Sequence
  TadA
SEVEFSHEYWMRHALTLAKRAWDEREVPVGAVLVHNNRVIGEGWNRPIGRHDPTAHAEIMALRQGGLVMQNYRLIDATLYVTLEPCVMCAGAMIHSRIGRVVFGARDAKTGAAGSLMDVLHHPGMNHRVEITEGILADECAALLSDFFRMRRQEIKAQKKAQSSTDSGGSSGGSSGSETPGTSESATPESSGGSSGGS

SEQ ID NO: 266 - protein, 198 aa, Artificial Sequence
  mutant TadA
SEVEFSHEYWMRHALTLAKRARDEREVPVGAVLVLNNRVIGEGWNRAIGLHDPTAHAEIMALRQGGLVMQNYRLIDATLYVTFEPCVMCAGAMIHSRIGRVVFGVRNAKTGAAGSLMDVLHYPGMNHRVEITEGILADECAALLCYFFRMPRQVFNAQKKAQSSTDSGGSSGGSSGSETPGTSESATPESSGGSSGGS

SEQ ID NO: 267 - DNA, 594 bp, Artificial Sequence
  TadA
tctgaagtcgagtttagccacgagtattggatgaggcacgcactgaccctggcaaagcgagcatgggatgaaagagaagtccccgtgggcgccgtgctggtgcacaacaatagagtgatcggagagggatggaacaggccaatcggccgccacgaccctaccgcacacgcagagatcatggcactgaggcagggaggcctggtcatgcagaattaccgcctgatcgatgccaccctgtatgtgacactggagccatgcgtgatgtgcgcaggagcaatgatccacagcaggatcggaagagtggtgttcggagcacgggacgccaagaccggcgcagcaggctccctgatggatgtgctgcaccaccccggcatgaaccaccgggtggagatcacagagggaatcctggcagacgagtgcgccgccctgctgagcgatttctttagaatgcggagacaggagatcaaggcccagaagaaggcacagagctccaccgactctggaggatctagcggaggatcctctggaagcgagacaccaggcacaagcgagtccgccacaccagagagctccggcggctcctccggaggatcc

SEQ ID NO: 268 - DNA, 594 bp, Artificial Sequence
  mutant TadA
tctgaggtggagttttcccacgagtactggatgagacatgccctgaccctggccaagagggcacgcgatgagagggaggtgcctgtgggagccgtgctggtgctgaacaatagagtgatcggcgagggctggaacagagccatcggcctgcacgacccaacagcccatgccgaaattatggccctgaggaagggaggcctggtcatgcagaactacagactgattgacgccaccctgtacgtgacattcgagccttgcgtgatgtgcgccggcgccatgatccactctaggatcggccgcgtggtgtttggcgtgaggaacgcaaaaaccggcgccgcaggctccctgatggacgtgctgcactaccccggcatgaatcaccgcgtcgaaattaccgagggaatcctggcagatgaatgtgccgccctgctgtgctatttctttcggatgcctagacaggtgttcaatgctcagaagaaggcccagagctccaccgactccggaggatctagcggcggatcctctggctctgagacacctggcacaagcgagagcgcaacacctgaaagcagcgggggcagcagcggggggtca

SEQ ID NO: 269 - DNA, 23 bp, Artificial Sequence
  wildtype and edited sequence
tttatcacaggctccaggaaggg

SEQ ID NO: 270 - DNA, 29 bp, Artificial Sequence
  HBG1/2 forward primer
cagggtttctcctccagcatcttccacat

SEQ ID NO: 271 - DNA, 21 bp, Artificial Sequence
  HBG1/2 reverse primer
agcagcagtatcctcttgggg

SEQ ID NO: 272 - DNA, 23 bp, Artificial Sequence
  HBA primer
tcctgcagggtgaggaaggaagg

SEQ ID NO: 273 - DNA, 25 bp, Artificial Sequence
  HBA primer
tctatgcacatcaattagcagaggc

SEQ ID NO: 274 - DNA, 24 bp, Artificial Sequence
  HBA primer
ccccaaggcactccagggacatag

SEQ ID NO: 275 - DNA, 23 bp, Artificial Sequence
  sgBCL11Ae
ttttatcacaggctccaggaagg

SEQ ID NO: 276 - DNA, 23 bp, Artificial Sequence
  sgHBG
cttgaccaatagccttgacaagg

SEQ ID NO: 277 - DNA, 23 bp, Artificial Sequence
  sgHBG
gctattggtcaaggcaaggctgg

SEQ ID NO: 278 - DNA, 23 bp, Artificial Sequence
  sgHBG
gtggggaaggggcccccaagagg

SEQ ID NO: 279 - DNA, 444 bp, Artificial Sequence
  dual base editing vector
atggtgcatctgactcctgaggagaagtctgccgttactgccctgtggggcaaggtgaacgtggatgaagttggtggtgaggccctgggcaggctgctggtggtctacccttggacccagaggttctttgagtcctttggggatctgtccactcctgatgctgttatgggcaaccctaaggtgaaggctcatggcaagaaagtgctcggtgcctttagtgatggcctggctcacctggacaacctcaagggcacctttgccacactgagtgagctgcactgtgacaagctgcacgtggatcctgagaacttcaggctcctgggcaacgtgctggtctgtgtgctggcccatcactttggcaaagaattcaccccaccagtgcaggctgcctatcagaaagtggtggctggtgtggctaatgccctggcccacaagtatcactaa

SEQ ID NO: 280 - DNA, 594 bp, Artificial Sequence; identical to SEQ ID NO: 267
  TadA
  misc_feature (15)..(15): site for modification
  misc_feature (57)..(57): site for modification
  misc_feature (63)..(63): site for modification
  misc_feature (69)..(69): site for modification
  misc_feature (87)..(87): site for modification
  misc_feature (112)..(112): site for modification
  misc_feature (114)..(114): site for modification
  misc_feature (126)..(126): site for modification
  misc_feature (147)..(147): site for modification
  misc_feature (198)..(198): site for modification
  misc_feature (216)..(216): site for modification
  misc_feature (289)..(289): site for modification
  misc_feature (318)..(318): site for modification
  misc_feature (333)..(333): site for modification
  misc_feature (343)..(343): site for modification
  misc_feature (344)..(344): site for modification
  misc_feature (369)..(369): site for modification
  misc_feature (402)..(402): site for modification
  misc_feature (451)..(451): site for modification
  misc_feature (507)..(507): site for modification
  misc_feature (547)..(547): site for modification
  misc_feature (548)..(548): site for modification
  misc_feature (568)..(568): site for modification
  misc_feature (569)..(569): site for modification
  misc_feature (570)..(570): site for modification

SEQ ID NO: 281 - DNA, 594 bp, Artificial Sequence
  mutant TadA
  misc_feature (321)..(321): site for modification
  misc_feature (330)..(330): site for modification
  misc_feature (345)..(345): site for modification
  misc_feature (382)..(382): site for modification
  misc_feature (384)..(384): site for modification
  misc_feature (465)..(465): site for modification
  misc_feature (498)..(498): site for modification
  misc_feature (499)..(499): site for modification
  misc_feature (500)..(500): site for modification
  misc_feature (501)..(501): site for modification
  misc_feature (504)..(504): site for modification
  misc_feature (516)..(516): site for modification
  misc_feature (537)..(537): site for modification
  misc_feature (592)..(592): site for modification
  misc_feature (593)..(593): site for modification
  misc_feature (594)..(594): site for modification
tctgaggtggagttttcccacgagtactggatgagacatgccctgaccctggccaagagggcacgcgatgagagggaggtgcctgtgggagccgtgctggtgctgaacaatagagtgatcggcgagggctggaacagagccatcggcctgcacgacccaacagcccatgccgcaattatggccctgagacagggcggcctggtcatgcagaactacagactgattgacgccaccctgtacgtgacattcgagccttgcgtgatgtgcgccggcgccatgatccactctaggatcggccgcgtggtgtttggcgtgaggaacgcaaaaaccggcgccgcaggctccctgatggacgtgctgcactaccccggcatgaatcaccgcgtcgaaattaccgagggaatcctggcagatgaatgtgccgccctgctgtgctatttctttcggatgcctagacaggtgttcaatgctcagaagaaggcccagagctccaccgactccggaggatctagcggaggctcctctggctctgagacacctggcacaagcgagagcgcaacacctgaaagcagcgggggcagcagcggggggtca

SEQ ID NO: 282-285 - skipped (4 entries)

SEQ ID NO: 286 - DNA, 37688 bp, Artificial Sequence
  WL-PS1
  misc_feature (2582)..(2759): 1-->178
  misc_feature (2768)..(2801): loxP
  misc_feature (2808)..(2973): 179-->344
  misc_feature (2974)..(3007): loxP
  misc_feature (3016)..(27338): 3112-->27435
  misc_feature (27393)..(29862): lambda-1 (Complementary)
  misc_feature (30176)..(30390): BGH polyA
  misc_feature (30415)..(31080): copGFP (Complementary)
  misc_feature (31127)..(31779): CMV (Complementary)
  misc_feature (31831)..(33360): lambda-2
  misc_feature (34752)..(35866): Ad5E4orf6
  misc_feature (35864)..(37686): 32972-->34794
  misc_feature (334221)..(34756): 30544-->31879
taaacttggcgcgccctgagtgatttttctctggtcccgccgcatccataccgccagttgtttaccctcacaacgttccagtaaccgggcatgttcatcatcagtaacccgtatcgtgagcatcctctctcgtttcatcggtatcattacccccatgaacagaaatcccccttacacggaggcatcagtgaccaaacaggaaaaaaccgcccttaacatggcccgctttatcagaagccagacattaacgcttctggagaaactcaacgagctggacgcggatgaacaggcagacatctgtgaatcgcttcacgaccacgctgatgagctttaccgcagctgcctcgcgcgtttcggtgatgacggtgaaaacctctgacacatgcagctcccggagacggtcacagcttgtctgtaagcggatgccgggagcagacaagcccgtcagggcgcgtcagcgggtgttggcgggtgtcggggcgcagccatgacccagtcacgtagcgatagcggagtgtatactggcttaactatgcggcatcagagcagattgtactgagagtgcaccatatgcggtgtgaaataccgcacagatgcgtaaggagaaaataccgcatcaggcgctcttccgcttcctcgctcactgactcgctgcgctcggtcgttcggctgcggcgagcggtatcagctcactcaaaggcggtaatacggttatccacagaatcaggggataacgcaggaaagaacatgtgagcaaaaggccagcaaaaggccaggaaccgtaaaaaggccgcgttgctggcgtttttccataggctccgcccccctgacgagcatcacaaaaatcgacgctcaagtcagaggtggcgaaacccgacaggactataaagataccaggcgtttccccctggaagctccctcgtgcgctctcctgttccgaccctgccgcttaccggatacctgtccgcctttctcccttcgggaagcgtggcgctttctcatagctcacgctgtaggtatctcagttcggtgtaggtcgttcgctccaagctgggctgtgtgcacgaaccccccgttcagcccgaccgctgcgccttatccggtaactatcgtcttgagtccaacccggtaagacacgacttatcgccactggcagcagccactggtaacaggattagcagagcgaggtatgtaggcggtgctacagagttcttgaagtggtggcctaactacggctacactagaaggacagtatttggtatctgcgctctgctgaagccagttaccttcggaaaaagagttggtagctcttgatccggcaaacaaaccaccgctggtagcggtggtttttttgtttgcaagcagcagattacgcgcagaaaaaaaggatctcaagaagatcctttgatcttttctacggggtctgacgctcagtggaacgaaaactcacgttaagggattttggtcatgagattatcaaaaaggatcttcacctagatccttttaaattaaaaatgaagttttaaatcaatctaaagtatatatgagtaaacttggtctgacagttaccaatgcttaatcagtgaggcacctatctcagcgatctgtctatttcgttcatccatagttgcctgactccccgtcgtgtagataactacgatacgggagggcttaccatctggccccagtgctgcaatgataccgcgagacccacgctcaccggctccagatttatcagcaataaaccagccagccggaagggccgagcgcagaagtggtcctgcaactttatccgcctccatccagtctattaattgttgccgggaagctagagtaagtagttcgccagttaatagtttgcgcaacgttgttgccattgctgcaggcatcgtggtgtcacgctcgtcgtttggtatggcttcattcagctccggttcccaacgatcaaggcgagttacatgatcccccatgttgtgcaaaaaagcggttagctccttcggtcctccgatcgttgtcagaagtaagttggccgcagtgttatcactcatggttatggcagcactgcataattctcttactgtcatgccatccgtaagatgcttttctgtgactggtgagtactcaaccaagtcattctgagaatagtgtatgcggcgaccgagttgctcttgcccggcgtcaacacgggataataccgcgccacatagcagaactttaaaagtgctcatcattggaaaacgttcttcggggcgaaaactctcaaggatcttaccgctgttgagatccagttcgatgtaacccactcgtgcacccaactgatcttcagcatcttttactttcaccagcgtttctgggtgagcaaaaacaggaaggcaaaatgccgcaaaaaagggaataagggcgacacggaaatgttgaatactcatactcttcctttttcaatattattgaagcatttatcagggttattgtctcatgagcggatacatatttgaatgtatttagaaaaataaacaaataggggttccgcgcacatttccccgaaaagtgccacctgtctagctacgatatcctgtttaaacatcatcaataatataccttatagatggaatggtgccaatatgtaaatgaggtgattttaaaaagtgtgggccgtgtggtgattggctgtggggttaacggttaaaaggggcggcgcggccgtgggaaaatgacgttttatgggggtggagtttttttgcaagttgtcgcgggaaatgatttaaatataacttcgtatagcatacattatacgaagttatggatccttacgcataaaaaggcttcttttctcacggaactacttagttttcccacggtatttaacaggaaatgaggtagttttgaccggatgcaagtgaaaattgctgattttcgcgcgaaaactgaatgaggaagtgtttttctgaataatgtggtatttatggcagggtgataacttcgtatagcatacattatacgaagttatatttaaataggaatgtttatgccttaccagtgtaacatgaatcatgtgaaagtgttgttggaaccagatgccttttccagaatgagcctaacaggaatctttgacatgaacacgcaaatctggaagatcctgaggtatgatgatacgagatcgagggtgcgcgcatgcgaatgcggaggcaagcatgccaggttccagccggtgtgtgtagatgtgaccgaagatctcagaccggatcatttggttattgcccgcactggagcagagttcggatccagtggagaagaaactgactaaggtgagtattgggaaaactttggggtgggattttcagatggacagattgagtaaaaatttgttttttctgtcttgcagctgacatgagtggaaatgcttcttttaaggggggagtcttcagcccttatctgacagggcgtctcccatcctgggcaggagttcgtcagaatgttatgggatctactgtggatggaagacccgttcaacccgccaattcttcaacgctgacctatgctactttaagttcttcacctttggacgcagctgcagccgctgccgccgcctctgtcgccgctaacactgtgcttggaatgggttactatggaagcatcgtggctaattccacttcctctaataacccttctacactgactcaggacaagttacttgtccttttggcccagctggaggctttgacccaacgtctgggtgaactttctcagcaggtggccgagttgcgagtacaaactgagtctgctgtcggcacggcaaagtctaaataaaaaaaattccagaatcaatgaataaataaacgagcttgttgttgatttaaaatcaagtgtttttatttcatttttcgcgcacggtatgccctggaccaccgatctcgatcattgagaactcggtggattttttccagaatcctatagaggtgggattgaatgtttagatacatgggcattaggccgtctttggggtggagatagctccattgaagggattcatgctccggggtagtgttgtaaatcacccagtcataacaaggtcgcagtgcatggtgttgcacaatatcttttagaagtaggctgattgccacagataagcccttggtgtaggtgtttacaaaccggttgagctgggaggggtgcattcgaggtgaaattatgtgcattttggattggatttttaagttggcaatattgccgccaagatcccgtcttgggttcatgttatgaaggactaccaagacggtgtatccggtacatttaggaaatttatcgtgcagcttggatggaaaagcgtggaaaaatttggagacacccttgtgtcctccgagattttccatgcactcatccatgataatagcaatggggccgtgggcagcggcgcgggcaaacacgttccgtgggtctgacacatcatagttatgttcctgagttaaatcatcataagccattttaatgaatttggggcggagcgtaccagattggggtatgaatgttccttcgggccccggagcatagttcccctcacagatttgcatttcccaagctttcagttctgagggtggaatcatgtccacctggggggctatgaagaacaccgtttcgggggcgggggtgattagttgggatgatagcaagtttctgagcaattgagatttgccacatccggtggggccataaataattccgattacaggttgcaggtggtagtttagggaacggcaactgccgtcttctcgaagcaagggggccacctcgttcatcatttcccttacatgcatattttcccgcaccaaatccattaggaggcgctctcctcctagtgatagaagttcttgtagtgaggaaaagtttttcagcggttttagaccgtcagccatgggcattttggaaagagtttgctgcaaaagttctagtctgttccacagttcagtgatgtgttctatggcatctcgatccagcagacctcctcgtttcgcgggtttggacggctcctggagtagggtatgagacgatgggcgtccagcgctgccagggttcggtccttccagggtctcagtgttcgagtcagggttgtttccgtcacagtgaaggggtgtgcgcctgcttgggcgcttgccagggtgcgcttcagactcattctgctggtggagaacttctgtcgcttggcgccctgtatgtcggccaagtagcagtttaccatgagttcgtagttgagcgcctcggctgcgtggcctttggcgcggagcttacctttggaagttttcttgcataccgggcagtataggcatttcagcgcatacagcttgggcgcaaggaaaatggattctggggagtatgcatccgcgccgcaggaggcgcaaacagtttcacattccaccagccaggttaaatccggttcattggggtcaaaaacaagttttccgccatattttttgatgcgtttcttacctttggtctccataagttcgtgtcctcgttgagtgacaaacaggctgtccgtatctccgtagactgattttacaggcctcttctccagtggagtgcctcggtcttcttcgtacaggaactctgaccactctgatacaaaggcgcgcgtccaggccagcacaaaggaggctatgtgggaggggtagcgatcgttgtcaaccagggggtccaccttttccaaagtatgcaaacacatgtcaccctcttcaacatccaggaatgtgattggcttgtaggtgtatttcacgtgacctggggtccccgctgggggggtataaaagggggcggttctttgctcttcctcactgtcttccggatcgctgtccaggaacgtcagctgttggggtaggtattccctctcgaaggcgggcatgacctctgcactcaggttgtcagtttctaagaacgaggaggatttgatattgacagtgccggttgagatgcctttcatgaggttttcgtccatttggtcagaaaacacaatttttttattgtcaagtttggtggcaaatgatccatacagggcgttggataaaagtttggcaatggatcgcatggtttggttcttttccttgtccgcgcgctctttggcggcgatgttgagttggacatactcgcgtgccaggcacttccattcggggaagatagttgttaattcatctggcacgattctcacttgccaccctcgattatgcaaggtaattaaatccacactggtggccacctcgcctcgaaggggttcattggtccaacagagcctacctcctttcctagaacagaaagggggaagtgggtctagcataagttcatcgggagggtctgcatccatggtaaagattcccggaagtaaatccttatcaaaatagctgatgggagtggggtcatctaaggccatttgccattctcgagctgccagtgcgcgctcatatgggttaaggggactgccccagggcatgggatgggtgagagcagaggcatacatgccacagatgtcatagacgtagatgggatcctcaaagatgcctatgtaggttggatagcatcgcccccctctgatacttgctcgcacatagtcatatagttcatgtgatggcgctagcagccccggacccaagttggtgcgattgggtttttctgttctgtagacgatctggcgaaagatggcgtgagaattggaagagatggtgggtctttgaaaaatgttgaaatgggcatgaggtagacctacagagtctctgacaaagtgggcataagattcttgaagcttggttaccagttcggcggtgacaagtacgtctagggcgcagtagtcaagtgtttcttgaatgatgtcataacctggttggtttttcttttcccacagttcgcggttgagaaggtattcttcgcgatccttccagtactcttctagcggaaacccgtctttgtctgcacggtaagatcctagcatgtagaactgattaactgccttgtaagggcagcagcccttctctacgggtagagagtatgcttgagcagcttttcgtagcgaagcgtgagtaagggcaaaggtgtctctgaccatgactttgagaaattggtatttgaagtccatgtcgtcacaggctccctgttcccagagttggaagtctacccgtttcttgtaggcggggttgggcaaagcgaaagtaacatcattgaagagaatcttaccggctctgggcataaaattgcgagtgatgcggaaaggctgtggtacttccgctcgattgttgatcacctgggcagctaggacgatttcgtcgaaaccgttgatgttgtgtcctacgatgtataattctatgaaacgcggcgtgcctctgacgtgaggtagcttactgagctcatcaaaggttaggtctgtggggtcagataaggcgtagtgttcgagagcccattcgtgcaggtgaggatttgcatgtaggaatgatgaccaaagatctaccgccagtgctgtttgtaactggtcccgatactgacgaaaatgccggccaattgccattttttctggagtgacacagtagaaggttctggggtcttgttgccatcgatcccacttgagtttaatggctagatcgtgggccatgttgacgagacgctcttctcctgagagtttcatgaccagcatgaaaggaactagttgtttgccaaaggatcccatccaggtgtaagtttccacatcgtaggtcaggaagagtctttctgtgcgaggatgagagccgatcgggaagaactggatttcctgccaccagttggaggattggctgttgatgtgatggaagtagaagtttctgcggcgcgccgagcattcgtgtttgtgcttgtacagacggccgcagtagtcgcagcgttgcacgggttgtatctcgtgaatgagctgtacctggcttcccttgacgagaaatttcagtgggaagccgaggcctggcgattgtatctcgtgctcttctatattcgctgtatcggcctgttcatcttctgtttcgatggtggtcatgctgacgagcccccgcgggaggcaagtccagacctcggcgcgggaggggcggagctgaaggacgagagcgcgcaggctggagctgtccagagtcctgagacgctgcggactcaggttagtaggtagggacagaagattaacttgcatgatcttttccagggcgtgcgggaggttcagatggtacttgatttccacaggttcgtttgtagagacgtcaatggcttgcagggttccgtgtcctttgggcgccactaccgtacctttgttttttcttttgatcggtggtggctctcttgcttcttgcatgctcagaagcggtgacggggacgcgcgccgggcggcagcggttgttccggacccgggggcatggctggtagtggcacgtcggcgccgcgcacgggcaggttctggtattgcgctctgagaagacttgcgtgcgccaccacgcgtcgattgacgtcttgtatctgacgtctctgggtgaaagctaccggccccgtgagcttgaacctgaaagagagttcaacagaatcaatttcggtatcgttaacggcagcttgtctcagtatttcttgtacgtcaccagagttgtcctggtaggcgatctccgccatgaactgctcgatttcttcctcctgaagatctccgcgacccgctctttcgacggtggccgcgaggtcattggagatacggcccatgagttgggagaatgcattcatgcccgcctcgttccagacgcggctgtaaaccacggccccctcggagtctcttgcgcgcatcaccacctgagcgaggttaagctccacgtgtctggttaagaccgcatagttgcataggcgctgaaaaaggtagttgagtgtggtggcaatgtgttcggcgacgaagaaatacatgatccatcgtctcagcggcatttcgctaacatcgcccagagcttccaagcgctccatggcctcgtagaagtccacggcaaaattaaaaaactgggagtttcgcgcggacacggtcaattcctcctcgagaagacggatgagttcggctatggtggcccgtacttcgcgttcgaaggctcccgggatctcttcttcctcttctatctcttcttccactaacatctcttcttcgtcttcaggcgggggcggagggggcacgcggcgacgtcgacggcgcacgggcaaacggtcgatgaatcgttcaatgacctctccgcggcggcggcgcatggtttcagtgacggcgcggccgttctcgcgcggtcgcagagtaaaaacaccgccgcgcatctccttaaagtggtgactgggaggttctccgtttgggagggagagggcgctgattatacattttattaattggcccgtagggactgcgcgcagagatctgatcgtgtcaagatccacgggatctgaaaacctttcgacgaaagcgtctaaccagtcacagtcacaaggtaggctgagtacggcttcttgtgggcgggggtggttatgtgttcggtctgggtcttctgtttcttcttcatctcgggaaggtgagacgatgctgctggtgatgaaattaaagtaggcagttctaagacggcggatggtggcgaggagcaccaggtctttgggtccggcttgctggatacgcaggcgattggccattccccaagcattatcctgacatctagcaagatctttgtagtagtcttgcatgagccgttctacgggcacttcttcctcacccgttctgccatgcatacgtgtgagtccaaatccgcgcattggttgtaccagtgccaagtcagctacgactctttcggcgaggatggcttgctgtacttgggtaagggtggcttgaaagtcatcaaaatccacaaagcggtggtaagcccctgtattaatggtgtaagcacagttggccatgactgaccagttaactgtctggtgaccagggcgcacgagctcggtgtatttaaggcgcgaataggcgcgggtgtcaaagatgtaatcgttgcaggtgcgcaccagatactggtaccctataagaaaatgcggcggtggttggcggtagagaggccatcgttctgtagctggagcgccaggggcgaggtcttccaacataaggcggtgatagccgtagatgtacctggacatccaggtgattcctgcggcggtagtagaagcccgaggaaactcgcgtacgcggttccaaatgttgcgtagcggcatgaagtagttcattgtaggcacggtttgaccagtgaggcgcgcgcagtcattgatgctctatagacacggagaaaatgaaagcgttcagcgactcgactccgtagcctggaggaacgtgaacgggttgggtcgcggtgtaccccggttcgagacttgtactcgagccggccggagccgcggctaacgtggtattggcactcccgtctcgacccagcctacaaaaatccaggatacggaatcgagtcgttttgctggtttccgaatggcagggaagtgagtcctatttttttttttttttgccgctcagaatgcatcccgtgctgcgacagatgcgcccccaacaacagcccccctcgcagcagcagcagcagcaaccacaaaaggctgtccctgcaactactgcaactgccgccgtgagcggtgcgggacagcccgcctatgatctggacttggaagagggcgaaggactggcacgtctaggtgcgccttcgcccgagcggcatccgcgagttcaactgaaaaaagattctcgcgaggcgtatgtgccccaacagaacctatttagagacagaagcggcgaggagccggaggagatgcgagcttcccgctttaacgcgggtcgtgagctgcgtcacggtttggaccgaagacgagtgttgcgagacgaggatttcgaagttgatgaagtgacagggatcagtcctgccagggcacacgtggctgcagccaaccttgtatcggcttacgagcagacagtaaaggaagagcgtaacttccaaaagtcttttaataatcatgtgcgaaccctgattgcccgcgaagaagttacccttggtttgatgcatttgtgggatttgatggaagctatcattcagaaccctactagcaaacctctgaccgcccagctgtttctggtggtgcaacacagcagagacaatgaggctttcagagaggcgctgctgaacatcaccgaacccgaggggagatggttgtatgatcttatcaacattctacagagtatcatagtgcaggagcggagcctgggcctggccgagaaggtagctgccatcaattactcggttttgagcttgggaaaatattacgctcgcaaaatctacaagactccatacgttcccatagacaaggaggtgaagatagatgggttctacatgcgcatgacgctcaaggtcttgaccctgagcgatgatcttggggtgtatcgcaatgacagaatgcatcgcgcggttagcgccagcaggaggcgcgagttaagcgacagggaactgatgcacagtttgcaaagagctctgactggagctggaaccgagggtgagaattacttcgacatgggagctgacttgcagtggcagcctaatcgcagggctctgagcgccgcgacggcaggatgtgagcttccttacatagaagaggcggatgaaggcgaggaggaagagggcgagtacttggaagactgatggcacaacccgtgttttttgctagatggaacagcaagcaccggatcccgcaatgcgggcggcgctgcagagccagccgtccggcattaactcctcggacgattggacccaggccatgcaacgtatcatggcgttgacgactcgcaaccccgaagcctttagacagcaaccccaggccaaccgtctatcggccatcatggaagctgtagtgccttcccgatctaatcccactcatgagaaggtcctggccatcgtgaacgcgttggtggagaacaaagctattcgtccagatgaggccggactggtatacaacgctctcttagaacgcgtggctcgctacaacagtagcaatgtgcaaaccaatttggaccgtatgataacagatgtacgcgaagccgtgtctcagcgcgaaaggttccagcgtgatgccaacctgggttcgctggtggcgttaaatgctttcttgagtactcagcctgctaatgtgccgcgtggtcaacaggattatactaactttttaagtgctttgagactgatggtatcagaagtacctcagagcgaagtgtatcagtccggtcctgattacttctttcagactagcagacagggcttgcagacggtaaatctgagccaagcttttaaaaaccttaaaggtttgtggggagtgcatgccccggtaggagaaagagcaaccgtgtctagcttgttaactccgaactcccgcctgttattactgttggtagctcctttcaccgacagcggtagcatcgaccgtaattcctatttgggttacctactaaacctgtatcgcgaagccatagggcaaagtcaggtggacgagcagacctatcaagaaattacccaagtcagtcgcgctttgggacaggaagacactggcagtttggaagccactctgaacttcttgcttaccaatcggtctcaaaagatccctcctcaatatgctcttactgcggaggaggagaggatccttagatatgtgcagcagagcgtgggattgtttctgatgcaagagggggcaactccgactgcagcactggacatgacagcgcgaaatatggagcccagcatgtatgccagtaaccgacctttcattaacaaactgctggactacttgcacagagctgccgctatgaactctgattatttcaccaatgccatcttaaacccgcactggctgcccccacctggtttctacacgggcgaatatgacatgcccgaccctaatgacggatttctgtgggacgacgtggacagcgatgttttttcacctctttctgatcatcgcacgtggaaaaaggaaggcggtgatagaatgcattcttctgcatcgctgtccggggtcatgggtgctaccgcggctgagcccgagtctgcaagtccttttcctagtctacccttttctctacacagtgtacgtagcagcgaagtgggtagaataagtcgcccgagtttaatgggcgaagaggagtacctaaacgattccttgctcagaccggcaagagaaaaaaatttcccaaacaatggaatagaaagtttggtggataaaatgagtagatggaagacttatgctcaggatcacagagacgagcctgggatcatggggactacaagtagagcgagccgtagacgccagcgccatgacagacagaggggtcttgtgtgggacgatgaggattcggccgatgatagcagcgtgttggacttgggtgggagaggaaggggcaacccgtttgctcatttgcgccctcgcttgggtggtatgttgtgaaaaaaaataaaaaagaaaaactcaccaaggccatggcgacgagcgtacgttcgttcttctttattatctgtgtctagtataatgaggcgagtcgtgctaggcggagcggtggtgtatccggagggtcctcctccttcgtacgagagcgtgatgcagcagcagcaggcgacggcggtgatgcaatccccactggaggctccctttgtgcctccgcgatacctggcacctacggagggcagaaacagcattcgttactcggaactggcacctcagtacgataccaccaggttgtatctggtggacaacaagtcggcggacattgcttctctgaactatcagaatgaccacagcaacttcttgaccacggtggtgcagaacaatgactttacccctacggaagccagcacccagaccattaactttgatgaacgatcgcggtggggcggtcagctaaagaccatcatgcatactaacatgccaaacgtgaacgagtatatgtttagtaacaagttcaaagcgcgtgtgatggtgtccagaaaacctcccgacggtgctgcagttggggatacttatgatcacaagcaggatattttggaatatgagtggttcgagtttactttgccagaaggcaacttttcagttactatgactattgatttgatgaacaatgccatcatagataattacttgaaagtgggtagacagaatggagtgcttgaaagtgacattggtgttaagttcgacaccaggaacttcaagctgggatgggatcccgaaaccaagttgatcatgcctggagtgtatacgtatgaagccttccatcctgacattgtcttactgcctggctgcggagtggattttaccgagagtcgtttgagcaaccttcttggtatcagaaaaaaacagccatttcaagagggttttaagattttgtatgaagatttagaaggtggtaatattccggccctcttggatgtagatgcctatgagaacagtaagaaagaacaaaaagccaaaatagaagctgctacagctgctgcagaagctaaggcaaacatagttgccagcgactctacaagggttgctaacgctggagaggtcagaggagacaattttgcgccaacacctgttccgactgcagaatcattattggccgatgtgtctgaaggaacggacgtgaaactcactattcaacctgtagaaaaagatagtaagaatagaagctataatgtgttggaagacaaaatcaacacagcctatcgcagttggtatctttcgtacaattatggcgatcccgaaaaaggagtgcgttcctggacattgctcaccacctcagatgtcacctgcggagcagagcaggtttactggtcgcttccagacatgatgaaggatcctgtcactttccgctccactagacaagtcagtaactaccctgtggtgggtgcagagcttatgcccgtcttctcaaagagcttctacaacgaacaagctgtgtactcccagcagctccgccagtccacctcgcttacgcacgtcttcaaccgctttcctgagaaccagattttaatccgtccgccggcgcccaccattaccaccgtcagtgaaaacgttcctgctctcacagatcacgggaccctgccgttgcgcagcagtatccggggagtccaacgtgtgaccgttactgacgccagacgccgcacctgtccctacgtgtacaaggcactgggcatagtcgcaccgcgcgtcctttcaagccgcactttctaaaaaaaaaatgtccattcttatctcgcccagtaataacaccggttggggtctgcgcgctccaagcaagatgtacggaggcgcacgcaaacgttctacccaacatcccgtgcgtgttcgcggacattttcgcgctccatggggtgccctcaagggccgcactcgcgttcgaaccaccgtcgatgatgtaatcgatcaggtggttgccgacgcccgtaattatactcctactgcgcctacatctactgtggatgcagttattgacagtgtagtggctgacgctcgcaactatgctcgacgtaagagccggcgaaggcgcattgccagacgccaccgagctaccactgccatgcgagccgcaagagctctgctacgaagagctagacgcgtggggcgaagagccatgcttagggcggccagacgtgcagcttcgggcgccagcgccggcaggtcccgcaggcaagcagccgctgtcgcagcggcgactattgccgacatggcccaatcgcgaagaggcaatgtatactgggtgcgtgacgctgccaccggtcaacgtgtacccgtgcgcacccgtccccctcgcacttagaagatactgagcagtctccgatgttgtgtcccagcggcgaggatgtccaagcgcaaatacaaggaagaaatgctgcaggttatcgcacctgaagtctacggccaaccgttgaaggatgaaaaaaaaccccgcaaaatcaagcgggttaaaaaggacaaaaaagaagaggaagatggcgatgatgggctggcggagtttgtgcgcgagtttgccccacggcgacgcgtgcaatggcgtgggcgcaaagttcgacatgtgttgagacctggaacttcggtggtctttacacccggcgagcgttcaagcgctacttttaagcgttcctatgatgaggtgtacggggatgatgatattcttgagcaggcggctgaccgattaggcgagtttgcttatggcaagcgtagtagaataacttccaaggatgagacagtgtcaatacccttggatcatggaaatcccacccctagtcttaaaccggtcactttgcagcaagtgttacccgtaactccgcgaacaggtgttaaacgcgaaggtgaagatttgtatcccactatgcaactgatggtacccaaacgccagaagttggaggacgttttggagaaagtaaaagtggatccagatattcaacctgaggttaaagtgagacccattaagcaggtagcgcctggtctgggggtacaaactgtagacattaagattcccactgaaagtatggaagtgcaaactgaacccgcaaagcctactgccacctccactgaagtgcaaacggatccatggatgcccatgcctattacaactgacgccgccggtcccactcgaagatcccgacgaaagtacggtccagcaagtctgttgatgcccaattatgttgtacacccatctattattcctactcctggttaccgaggcactcgctactatcgcagccgaaacagtacctcccgccgtcgccgcaagacacctgcaaatcgcagtcgtcgccgtagacgcacaagcaaaccgactcccggcgccctggtgcggcaagtgtaccgcaatggtagtgcggaacctttgacactgccgcgtgcgcgttaccatccgagtatcatcacttaatcaatgttgccgctgcctccttgcagatatggccctcacttgtcgccttcgcgttcccatcactggttaccgaggaagaaactcgcgccgtagaagagggatgttgggacgcggaatgcgacgctacaggcgacggcgtgctatccgcaagcaattgcggggtggttttttaccagccttaattccaattatcgctgctgcaattggcgcgataccaggcatagcttccgtggcggttcaggcctcgcaacgacattgacattggaaaaaaaacgtataaataaaaaaaaatacaatggactctgacactcctggtcctgtgactatgttttcttagagatggaagacatcaatttttcatccttggctccgcgacacggcacgaagccgtacatgggcacctggagcgacatcggcacgagccaactgaacgggggcgccttcaattggagcagtatctggagcgggcttaaaaattttggctcaaccataaaaacatacgggaacaaagcttggaacagcagtacaggacaggcgcttagaaataaacttaaagaccagaacttccaacaaaaagtagtcgatgggatagcttccggcatcaatggagtggtagatttggctaaccaggctgtgcagaaaaagataaacagtcgtttggacccgccgccagcaaccccaggtgaaatgcaagtggaggaagaaattcctccgccagaaaaacgaggcgacaagcgtccgcgtcccgatttggaagagacgctggtgacgcgcgtagatgaaccgccttcttatgaggaagcaacgaagcttggaatgcccaccactagaccgatagccccaatggccaccggggtgatgaaaccttctcagttgcatcgacccgtcaccttggatttgccccctccccctgctgctactgctgtacccgcttctaagcctgtcgctgccccgaaaccagtcgccgtagccaggtcacgtcccgggggcgctcctcgtccaaatgcgcactggcaaaatactctgaacagcatcgtgggtctaggcgtgcaaagtgtaaaacgccgtcgctgcttttaattaaatatggagtagcgcttaacttgcctatctgtgtatatgtgtcattacacgccgtcacagcagcagaggaaaaaaggaagaggtcgtgcgtcgacgctgagttactttcaagatggccaccccatcgatgctgccccaatgggcatacatgcacatcgccggacaggatgcttcggagtacctgagtccgggtctggtgcagttcgcccgcgccacagacacctacttcaatctgggaaataagtttagaaatcccaccgtagcgccgacccacgatgtgaccaccgaccgtagccagcggctcatgttgcgcttcgtgcccgttgaccgggaggacaatacatactcttacaaagtgcggtacaccctggccgtgggcgacaacagagtgctggatatggccagcacgttctttgacattaggggcgtgttggacagaggtcccagtttcaaaccctattctggtacggcttacaactctctggctcctaaaggcgctccaaatgcatctcaatggattgcaaaaggcgtaccaactgcagcagccgcaggcaatggtgaagaagaacatgaaacagaggagaaaactgctacttacacttttgccaatgctcctgtaaaagccgaggctcaaattacaaaagagggcttaccaataggtttggagatttcagctgaaaacgaatctaaacccatctatgcagataaactttatcagccagaacctcaagtgggagatgaaacttggactgacctagacggaaaaaccgaagagtatggaggcagggctctaaagcctactactaacatgaaaccctgttacgggtcctatgcgaagcctactaatttaaaaggtggtcaggcaaaaccgaaaaactcggaaccgtcgagtgaaaaaattgaatatgatattgacatggaattttttgataactcatcgcaaagaacaaacttcagtcctaaaattgtcatgtatgcagaaaatgtaggtttggaaacgccagacactcatgtagtgtacaaacctggaacagaagacacaagttccgaagctaatttgggacaacagtctatgcccaacagacccaactacattggcttcagagataactttattggactcatgtactataacagtactggtaacatgggggtgctggctggtcaagcgtctcagttaaatgcagtggttgacttgcaggacagaaacacagaactttcttaccaactcttgcttgactctctgggcgacagaaccagatactttagcatgtggaatcaggctgtggacagttatgatcctgatgtacgtgttattgaaaatcatggtgtggaagatgaacttcccaactattgttttccactggacggcataggtgttccaacaaccagttacaaatcaatagttccaaatggagaagataataataattggaaagaacctgaagtaaatggaacaagtgagatcggacagggtaatttgtttgccatggaaattaaccttcaagccaatctatggcgaagtttcctttattccaatgtggctctgtatctcccagactcgtacaaatacaccccgtccaatgtcactcttccagaaaacaaaaacacctacgactacatgaacgggcgggtggtgccgccatctctagtagacacctatgtgaacattggtgccaggtggtctctggatgccatggacaatgtcaacccattcaaccaccaccgtaacgctggcttgcgttaccgatctatgcttctgggtaacggacgttatgtgcctttccacatacaagtgcctcaaaaattcttcgctgttaaaaacctgctgcttctcccaggctcctacacttatgagtggaactttaggaaggatgtgaacatggttctacagagttccctcggtaacgacctgcgggtagatggcgccagcatcagtttcacgagcatcaacctctatgctacttttttccccatggctcacaacaccgcttccacccttgaagccatgctgcggaatgacaccaatgatcagtcattcaacgactacctatctgcagctaacatgctctaccccattcctgccaatgcaaccaatattcccatttccattccttctcgcaactgggcggctttcagaggctggtcatttaccagactgaaaaccaaagaaactccctctttggggtctggatttgacccctactttgtctattctggttctattccctacctggatggtaccttctacctgaaccacacttttaagaaggtttccatcatgtttgactcttcagtgagctggcctggaaatgacaggttactatctcctaacgaatttgaaataaagcgcactgtggatggcgaaggctacaacgtagcccaatgcaacatgaccaaagactggttcttggtacagatgctcgccaactacaacatcggctatcagggcttctacattccagaaggatacaaagatcgcatgtattcatttttcagaaacttccagcccatgagcaggcaggtggttgatgaggtcaattacaaagacttcaaggccgtcgccataccctaccaacacaacaactctggctttgtgggttacatggctccgaccatgcgccaaggtcaaccctatcccgctaactatccctatccactcattggaacaactgccgtaaatagtgttacgcagaaaaagttcttgtgtgacagaaccatgtggcgcataccgttctcgagcaacttcatgtctatgggggcccttacagacttgggacagaatatgctctatgccaactcagctcatgctctggacatgacctttgaggtggatcccatggatgagcccaccctgctttatcttctcttcgaagttttcgacgtggtcagagtgcatcagccacaccgcggcatcatcgaggcagtctacctgcgtacaccgttctcggccggtaacgctaccacgtaagaagcttcttgcttcttgcaaatagcagctgcaaccatggcctgcggatcccaaaacggctccagcgagcaagagctcagagccattgtccaagacctgggttgcggaccctattttttgggaacctacgataagcgcttcccggggttcatggcccccgataagctcgcctgtgccattgtaaatacggccggacgtgagacggggggagagcactggttggctttcggttggaacccacgttctaacacctgctacctttttgatccttttggattctcggatgatcgtctcaaacagatttaccagtttgaatatgagggtctcctgcgccgcagcgctcttgctaccaaggaccgctgtattacgctggaaaaatctacccagaccgtgcagggcccccgttctgccgcctgcggacttttctgctgcatgttccttcacgcctttgtgcactggcctgaccgtcccatggacggaaaccccaccatgaaattgctaactggagtgccaaacaacatgcttcattctcctaaagtccagcccaccctgtgtgacaatcaaaaagcactctaccattttcttaatacccattcgccttattttcgctctcatcgtacacacatcgaaagggccactgcgttcgaccgtatggatgttcaataatgactcatgtaaacaacgtgttcaataaacatcactttatttttttacatgtatcaaggctctggattacttatttatttacaagtcgaatgggttctgacgagaatcagaatgacccgcaggcagtgatacgttgcggaactgatacttgggttgccacttgaattcgggaatcaccaacttgggaaccggtatatcgggcaggatgtcactccacagctttctggtcagctgcaaagctccaagcaggtcaggagccgaaatcttgaaatcacaattaggaccagtgctctgagcgcgagagttgcggtacaccggattgcagcactgaaacaccatcagcgacggatgtctcacgcttgccagcacggtgggatctgcaatcatgcccacatccagatcttcagcattggcaatgctgaacggggtcatcttgcaggtctgcctacccatggcgggcacccaattaggcttgtggttgcaatcgcagtgcagggggatcagtatcatcttggcctgatcctgtctgattcctggatacacggctctcatgaaagcatcatattgcttgaaagcctgctgggctttactaccctcgggataaaacatcccgcaggacctgctcgaaaactggttagcctgcacagccggcatcattcacacagcagcgggcgtcattgttggctatttgcaccacacttctgccccagcggttttgggtgattttggttcgctcgggattctcctttaaggctcgttgtccgttctcgctggccacatccatctcgataatctgctccttctgaatcataatattgccatgcaggcacttcagcttgccctcataatcattgcagccatgaggccacaacgcacagcctgtacattcccaattatggtgggcgatctgagaaaaagaatgtatcattccctgcagaaatcttcccatcatcgtgctcagtgtcttgtgactagtgaaagttaactggatgcctcggtgctcttcgtttacgtactggtgacagatgcgcttgtattgttcgtgttgctcaggcattagtttaaaacaggttctaagttcgttatccagcctgtacttctccatcagcagacacatcacttccatgcctttctcccaagcagacaccaggggcaagctaatcggattcttaacagtgcaggcagcagctcctttagccagagggtcatctttagcgatcttctcaatgcttcttttgccatccttctcaacgatgcgcacgggcgggtagctgaaacccactgctacaagttgcgcctcttctctttcttcttcgctgtcttgactgatgtcttgcatggggatatgtttggtcttccttggcttctttttggggggtatcggaggaggaggactgtcgctccgttccggagacagggaggattgtgacgtttcgctcaccattaccaactgactgtcggtagaagaacctgaccccacacggcgacaggtgtttttcttcgggggcagaggtggaggcgattgcgaagggctgcggtccgacctggaaggcggatgactggcagaaccccttccgcgttcgggggtgtgctccctgtggcggtcgcttaactgatttccttcgcggctggccattgtgttctcctaggcagagaaacaacagacatggaaactcagccattgctgtcaacatcgccacgagtgccatcacatctcgtcctcagcgacgaggaaaaggagcagagcttaagcattccaccgcccagtcctgccaccacctctaccctagaagataaggaggtcgacgcatctcatgacatgcagaataaaaaagcgaaagagtctgagacagacatcgagcaagacccgggctatgtgacaccggtggaacacgaggaagagttgaaacgctttctagagagagaggatgaaaactgcccaaaacagcgagcagataactatcaccaagatgctggaaatagggatcagaacaccgactacctcatagggcttgacggggaagacgcgctccttaaacatctagcaagacagtcgctcatagtcaaggatgcattattggacagaactgaagtgcccatcagtgtggaagagctcagctgcgcctacgagcttaaccttttttcacctcgtactccccccaaacgtcagccaaacggcacctgcgagccaaatcctcgcttaaacttttatccagcttttgctgtgccagaagtactggctacctatcacatcttttttaaaaatcaaaaaattccagtctcctgccgcgctaatcgcacccgcgccgatgccctactcaatctgggacctggttcacgcttacctgatatagcttccttggaagaggttccaaagatcttcgagggtctgggcaataatgagactcgggccgcaaatgctctgcaaaagggagaaaatggcatggatgagcatcacagcgttctggtggaattggaaggcgataatgccagactcgcagtactcaagcgaagcgtcgaggtcacacacttcgcatatcccgctgtcaacctgccccctaaagtcatgacggcggtcatggaccagttactcattaagcgcgcaagtcccctttcagaagacatgcatgacccagatgcctgtgatgagggtaaaccagtggtcagtgatgagcagctaacccgatggctgggcaccgactctccccgggatttggaagagcgtcgcaagcttatgatggccgtggtgctggttaccgtagaactagagtgtctccgacgtttctttaccgattcagaaaccttgcgcaaactcgaagagaatctgcactacacttttagacacggctttgtgcggcaggcatgcaagatatctaacgtggaactcaccaacctggtttcctacatgggtattctgcatgagaatcgcctaggacaaagcgtgctgcacagcacccttaagggggaagcccgccgtgattacatccgcgattgtgtctatctctacctgtgccacacgtggcaaaccggcatgggtgtatggcagcaatgtttagaagaacagaacttgaaagagcttgacaagctcttacagaaatctcttaaggttctgtggacagggttcgacgagcgcaccgtcgcttccgacctggcagacctcatcttcccagagcgtctcagggttactttgcgaaacggattgcctgactttatgagccagagcatgcttaacaattttcgctctttcatcctggaacgctccggtatcctgcccgccacctgctgcgcactgccctccgactttgtgcctctcacctaccgcgagtgccccccgccgctatggagtcactgctacctgttccgtctggccaactatctctcctaccactcggatgtgatcgaggatgtgagcggagacggcttgctggagtgccactgccgctgcaatctgtgcacgccccaccggtccctagcttgcaacccccagttgatgagcgaaacccagataataggcacctttgaattgcaaggccccagcagccaaggcgatgggtcttctcctgggcaaagtttaaaactgaccccgggactgtggacctccgcctacttgcgcaagtttgctccggaagattaccacccctatgaaatcaagttctatgaggaccaatcacagcctccaaaggccgaactttcggcttgcgtcatcacccagggggcaattctggcccaattgcaagccatccaaaaatcccgccaagaatttctactgaaaaagggtaagggggtctaccttgacccccagaccggcgaggaactcaacacaaggttccctcaggatgtcccaacgacgagaaaacaagaagttgaaggtgcagccgccgcccccagaagatatggaggaagattgggacagtcaggcagaggaggcggaggaggacagtctggaggacagtctggaggaagacagtttggaggaggaaaacgaggaggcagaggaggtggaagaagtaaccgccgacaaacagttatcctcggctgcggagacaagcaacagcgctaccatctccgctccgagtcgaggaacccggcggcgtcccagcagtagatgggacgagaccggacgcttcccgaacccaaccagcgcttccaagaccggtaagaaggatcggcagggatacaagtcctggcgggggcataagaatgccatcatctcctgcttgcatgagtgcgggggcaacatatccttcacgcggcgctacttgctattccaccatggggtgaactttccgcgcaatgttttgcattactaccgtcacctccacagcccctactatagccagcaaatcccgacagtctcgacagataaagacagcggcggcgacctccaacagaaaaccagcagcggcagttagaaaatacacaacaagtgcagcaacaggaggattaaagattacagccaacgagccagcgcaaacccgagagttaagaaatcggatctttccaaccctgtatgccatcttccagcagagtcggggtcaagagcaggaactgaaaataaaaaaccgatctctgcgttcgctcaccagaagttgtttgtatcacaagagcgaagatcaacttcagcgcactctcgaggacgccgaggctctcttcaacaagtactgcgcgctgactcttaaagagtaggcagcgaccgcgcttattcaaaaaaggcgggaattacatcatcctcgacatgagtaaagaaattcccacgccttacatgtggagttatcaaccccaaatgggattggcagcaggcgcctcccaggactactccacccgcatgaattggctcagcgccgggccttctatgatttctcgagttaatgatatacgcgcctaccgaaaccaaatacttttggaacagtcagctcttaccaccacgccccgccaacaccttaatcccagaaattggcccgccgccctagtgtaccaggaaagtcccgctcccaccactgtattacttcctcgagacgcccaggccgaagtccaaatgactaatgcaggtgcgcagttagctggcggctccaccctatgtcgtcacaggcctcggcataatataaaacgcctgatgatcagaggccgaggtatccagctcaacgacgagtcggtgagctctccgcttggtctacgaccagacggaatctttcagattgccggctgcgggagatcttccttcacccctcgtcaggctgttctgactttggaaagttcgtcttcgcaaccccgctcgggcggaatcgggaccgttcaatttgtagaggagtttactccctctgtctacttcaaccccttctccggatctcctgggcactacccggacgagttcataccgaacttcgacgcgattagcgagtcagtggacggctacgattgatgtctggtgacgcggctgagctatctcggctgcgacatctagaccactgccgccgctttcgctgctttgcccgggaacttattgagttcatctacttcgaactccccaaggatcaccctcaaggtccggcccacggagtgcggattactatcgaaggcaaaatagactctcgcctgcaacgaattttctcccagcggcccgtgctgatcgagcgagaccagggaaacaccacggttagtaatcaattacggggtcattagttcatagcccatatatggagttgcgatcgctgcgggccatgtcatacaccgccttcagagcagccggacctatctgcccgttcgtgccgtcgttgttaatcaccacatggttattctgctcaaacgtcccggacgcctgcgaccggctgtctgccatgctgcccggtgtaccgacataaccgccggtggcatagccgcgcatcagccggtaaagattccccacgccaatccggctggttgcctccttcgtgaagacaaactcaccacggtgaacaatccccgctggctcatatttgccgccggttcccgtaaatcctccggttgcaaaatggaatttcgccgcagcggcctgaatggctgtaccgcctgacgcggatgcgccgccaccaacagccccgccaatggcgctgccgatactcccgacaatccccaccattgcctgcttaagcagaatttctgtcatcatggacagcacggaacgggtgaagctgcgccagttctgctcactgccggtcagcatcgccgccatattctgtgcaataccatcaaaggtctgcgtggctgcactttttacctgcgacatactgtccgtggcgctctcttcccactcactccagccggacttcaggcctgccatccagttcccgcgaagctggtcttcagccgcccaggtctttttctgctctgacatgacgttattcagcgccagcggattatcgccatactgttccttcaggcgctgttccgtggcttcccgttctgcctgccggtcagtcagcccccggcttttcgcatcaatggcggcccgttttgcccgttgctgctgtgcgaatttatccgcctgctgcgccagcgcgttcaggcgctcctgatacgtaaccttgtcgccaagtgcagccagctggcgtttgtactccagcgtctcatctttatgcgccagcagggatttctcctgtgcagacagctggcgacgttgcgccgcctcctccagtaccgcgaactgactctccgccttccacaaatcccggcgctgctggctgattttctcatttgctccggcatgcttctccagcgtccggagttctgcctgaagcgtcagcagggcagcatgagcactgtcttcctgacgatcgcccgcagacaccttcacgctggactgtttcggctttttcagcgtcgcttcataatcctttttcgccgccgccatcagcgtgttgtaatccgcctgcaggattttcccgtctttcagtgccttgttcagttcttcctgacgggcggtatatttctccagcggcgtctgcagccgttcgtaagccttctgcgcctcttcggtatatttcagccgtgacgcttcggtatcgctctgctgctgcgcatttttgtcctgttgagtctgctgctcagccttctttcgggcggcttcaagcgcaagacgggccttttcacgatcatcccagtaacgcgcccgcgcttcatcgttaacaaaataatcatccttgcgcagattccagatgtcgtctgctttcttatacgcagcctctgccttaatcagcatctcctgcgcggtatcaggacgaccaatatccagcaccgcatcccacatggatttgaatgcccgcgcagtcctgtctgcccaggtctccagcgtgcccatgttctctttcaggcggcgggtctggtcatcaaaccctttcgttgcggcctcgttcgccgcctgcaatgccccggcttcatcgccggaacgctgcaactgagcaacatacgcaatctgctccgccgacacgttatggaactggcgagccatcgccgtcagccccgacgtcgggtctgtggtcagcttcccgaaggcttcagcgaccttgtccacctccacgccggatgcagaggagaaacgcgccacactctggctgatggacgcaatctgagcctcaccgcttacccccgccttaaccagtgcgctgagtgactcgctggtctggttaaacgtcagccctgccgcctgcccggctctggacaggaccagcatacgatctgccgtcagtcccgcctgattgccggaaaggaccagcgttttgttgaaatcggacagggttgagttgccctgataccaggcatacgccagcgcaccggtcgccaccgccagcgaggtggcccccaccatcggcagggtgatcgcaccggcaagccccctgaacatggggatcatcccgccgaaggagtccttcacctgccccccctgttgcagcaggatcagccacggactttgcccgcctgcaagctgcgtggccacgtcggtgaactgtgcaggcagcatacgcatggcggctttatactgcccgacggaaatccccgctttctgtgcagccagcgcctgtcggctcagcgactgttcaacgactgccgctgtttttttcgcatcactttccgtaccagaaaaatgacgcctgactctggccatctgctcgtcaaatctggccgcatccagactcaaatcaacgacgtcgactaagctctagcatttgtgaaccatcaccctaatcaagttttttggggtcgaggtgccgtaaagcactaaatcggaaccctaaagggagcccccgatttagagcttgacggggaaagccggcgaacgtggcgagaaaggaagggaagaaagcgaaaggagcgggcgctagggcgctggcaagtgtagcggtcacgctgcgcgtaaccaccacacccgccgcgcttaatgcgccgctacagggcgcgtggggataccccctagagccccagctggttctttccgcctcagaagccatagagcccaccgcatccccagcatgcctgctattgtcttcccaatcctcccccttgctgtcctgccccaccccaccccccagaatagaatgacacctactcagacaatgcgatgcaatttcctcattttattaggaaaggacagtgggagtggcaccttccagggtcaaggaaggcacgggggaggggcaaacaacagatggctggcaactagaaggcacagtcgaggctgatcagcgggtttgctagcttaggcgaaggcgatgggggtcttgaaggcgtgctggtactccacgatgcccagctcggtgttgctgtgcagctcctccacgcggcggaaggcgaacatggggcccccgttctgcaggatgctggggtggatggcgctcttgaagtgcatgtggctgtccaccacgaagctgtagtagccgccgtcgcgcaggctgaaggtgcgggcgaagctgcccaccagcacgttatcgcccatggggtgcaggtgctccacggtggcgttgctgcggatgatcttgtcggtgaagatcacgctgtcctcggggaagccggtgcccaccaccttgaagtcgccgatcacgcggccggcctcgtagcggtagctgaagctcacgtgcagcacgccgccgtcctcgtacttctcgatgcgggtgttggtgtagccgccgttgttgatggcgtgcaggaaggggttctcgtagccgctggggtaggtgccgaagtggtagaagccgtagcccatcacgtggctcagcaggtaggggctgaaggtcagggcgcctttggtgctcttcatcttgttggtcatgcggccctgctcgggggtgccctctccgccgcccaccagctcgaactccacgccgttcagggtgccggtgatgcggcactcgatcttcatggcgggcatggtggctagcctagccagcttgggtctccctatagtgagtcgtattaatttcgataagccagtaagcagtgggttctctagttagccagagagctctgcttatatagacctcccaccgtacacgcctaccgcccatttgcgtcaatggggcggagttgttacgacattttggaaagtcccgttgattttggtgccaaaacaaactcccattgacgtcaatggggtggagacttggaaatccccgtgagtcaaaccgctatccacgcccattgatgtactgccaaaaccgcatcaccatggtaatagcgatgactaatacgtagatgtactgccaagtaggaaagtcccataaggtcatgtactgggcataatgccaggcgggccatttaccgtcattgacgtcaatagggggcgtacttggcatatgatacacttgatgtactgccaagtgggcagtttaccgtaaatactccacccattgacgtcaatggaaagtccctattggcgttactatgggaacatacgtcattattgacgtcaatgggcgggggtcgttgggcggtcagccaggcgggccatttaccgtaagttatgtaacgcggaactccatatatgggctatgaactaatgaccccgtaattgattactattaataactacaataatcaatgtcaacgcgtatatctggcccgtacatcgcgaagcagcgcaaaacgcctaaccctaagcagattcttcatgcaattaagcttcgcggtgcttcttcagtacgctacggcaaatgtcatcgacgtttttatccggaaactgctgtctggctttttttgatttcagaattagcctgacgggcaatgctgcgaagggcgttttcctgctgaggtgtcattgaacaagtcccatgtcggcaagcataagcacacagaatatgaagcccgctgccagaaaaatgcattccgtggttgtcatacctggtttctctcatctgcttctgctttcgccaccatcatttccagcttttgtgaaagggatgcggctaacgtatgaaattcttcgtctgtttctactggtattggcacaaacctgattccaatttgagcaaggctatgtgccatctcgatactcgttcttaactcaacagaagatgctttgtgcatacagcccctcgtttattatttatctcctcagccagccgctgtgctttcagtggatttcggataacagaaaggccgggaaatacccagcctcgctttgtaacggagtagacgaaagtgattgcgcctacccggatattatcgtgaggatgcgtcatcgccattgctccccaaatacaaaaccaatttcagccagtgcctcgtccattttttcgatgaactccggcacgatctcgtcaaaactcgccatgtacttttcatcccgctcaatcacgacataatgcaggccttcacgcttcatacgcgggtcatagttggcaaagtaccaggcattttttcgcgtcacccacatgctgtactgcacctgggccatgtaagctgactttatggcctcgaaaccaccgagccggaacttcatgaaatcccgggaggtaaacgggcatttcagttcaaggccgttgccgtcactgcataaaccatcgggagagcaggcggtacgcatactttcgtcgcgatagatgatcggggattcagtaacattcacgccggaagtgaattcaaacagggttctggcgtcgttctcgtactgttttccccaggccagtgctttagcgttaacttccggagccacaccggtgcaaacctcagcaagcagggtgtggaagtaggacattttcatgtcaggccacttctttccggagcggggttttgctatcacgttgtgaacttctgaagcggtgatgacgccgagccgtaatttgtgccacgcatcatccccctgttcgacagctctcacatcgatcccggtacgctgcaggataatgtccggtgtcatgctgccaccttctgctctgcggctttctgtttcaggaatccaagagcttttactgcttcggcctgtgtcagttctgacgatgcacgaatgtcgcggcgaaatatctgggaacagagcggcaataagtcgtcatcccatgttttatccagggcgatcagcagagtgttaatctcctgcatggtttcatcgttaaccggagtgatgtcgcgttccggctgacgttctgcagtgtatgcagtattttcgacaatgcgctcggcttcatccttgtcatagataccagcaaatccgaagcggccgcggaacaacaacaattgcattcattttatgtttcaggttcagggggaggtgtggtcctgcgattccatcgagtgcacctacaccctgctgaagaccctatgcggcctaagagacctgctaccaatgaattaaaaaaaaatgattaataaaaaatcacttacttgaaatcagcaataaggtctctgttgaaattttctcccagcagcacctcacttccctcttcccaactctggtattctaaaccccgttcagcggcatactttctccatactttaaaggggatgtcaaattttagctcctctcctgtacccacaatcttcatgtctttcttcccagatgaccaagagagtccggctcagtgactccttcaaccctgtctacccctatgaagatgaaagcacctcccaacaccccttttataacccagggtttatttccccaaatggcttcacacaaagcccagacggagttcttactttaaaatgtttaaccccactaacaaccacaggcggatctctacagctaaaagtgggagggggacttacagtggatgacactgatggtaccttacaagaaaacatacgtgctacagcacccattactaaaaataatcactctgtagaactatccattggaaatggattagaaactcaaaacaataaactatgtgccaaattgggaaatgggttaaaatttaacaacggtgacatttgtataaaggatagtattaacaccttatggactggaataaaccctccacctaactgtcaaattgtggaaaacactaatacaaatgatggcaaacttactttagtattagtaaaaaatggagggcttgttaatggctacgtgtctctagttggtgtatcagacactgtgaaccaaatgttcacacaaaagacagcaaacatccaattaagattatattttgactcttctggaaatctattaactgaggaatcagacttaaaaattccacttaaaaataaatcttctacagcgaccagtgaaactgtagccagcagcaaagcctttatgccaagtactacagcttatcccttcaacaccactactagggatagtgaaaactacattcatggaatatgttactacatgactagttatgatagaagtctatttcccttgaacatttctataatgctaaacagccgtatgatttcttccaatgttgcctatgccatacaatttgaatggaatctaaatgcaagtgaatctccagaaagcaacatagctacgctgaccacatccccctttttcttttcttacattacagaagacgacaactaaaataaagtttaagtgtttttatttaaaatcacaaaattcgagtagttattttgcctccaccttcccatttgacagaatacacagtcctttctccccggctggccttaaaaagcatcatatcatgggtaacagacatattcttaggtgttatattccacacggtttcctgtcgagccaaacgctcatcagtgatattaataaactccccgggcagctcacttaagttcatgtcgctgtccagctgctgagccacaggctgctgtccaacttgcggttgcttaacgggcggcgaaggagaagtccacgcctacatgggggtagagtcataatcgtgcatcaggatagggcggtggtgctgcagcagcgcgcgaataaactgctgccgccgccgctccgtcctgcaggaatacaacatggcagtggtctcctcagcgatgattcgcaccgcccgcagcataaggcgccttgtcctccgggcacagcagcgcaccctgatctcacttaaatcagcacagtaactgcagcacagcaccacaatattgttcaaaatcccacagtgcaaggcgctgtatccaaagctcatggcggggaccacagaacccacgtggccatcataccacaagcgcaggtagattaagtggcgacccctcataaacacgctggacataaacattacctcttttggcatgttgtaattcaccacctcccggtaccatataaacctctgattaaacatggcgccatccaccaccatcctaaaccagctggccaaaacctgcccgccggctatacactgcagggaaccgggactggaacaatgacagtggagagcccaggactcgtaaccatggatcatcatgctcgtcatgatgtcaatgttggcacaacacaggcacacgtgcatacacttcctcaggattacaagctcctcccgcgttagaaccatatcccagggaacaacccattcctgaatcagcgtaaatcccacactgcagggaagacctcgcacgtaactcacgttgtgcattgtcaaagtgttacattcgggcagcagcggatgatcctccagtatggtagcgcgggtttctgtctcaaaaggaggtagacgatccctactgtacggagtgcgccgagacaaccgagatcgtgttggtcgtagtgtcatgccaaatggaacgccggacgtagtcattctcgtattttgtatagcaaaacgcggccctggcagaacacactcttcttcgccttctatcctgccgcttagcgtgttccgtgtgatagttcaagtacagccacactcttaagttggtcaaaagaatgctggcttcagttgtaatcaaaactccatcgcatctaattgttctgaggaaatcatccacggtagcatatgcaaatcccaaccaagcaatgcaactggattgcgtttcaagcaggagaggagagggaagagacggaagaaccatgttaatttttattccaaacgatctcgcagtacttcaaattgtagatcgcgcagatggcatctctcgcccccactgtgttggtgaaaaagcacagctaaatcaaaagaaatgcgattttcaaggtgctcaacggtggcttccaacaaagcctccacgcgcacatccaagaacaaaagaataccaaaagaaggagcattttctaactcctcaatcatcatattacattcctgcaccattcccagataattttcagctttccagccttgaattattcgtgtcagttcttgtggtaaatccaatccacacattacaaacaggtcccggagggcgccctccaccaccattcttaaacacaccctcataatgacaaaatatcttgctcctgtgtcacctgtagcgaattgagaatggcaacatcaattgacatgcccttggctctaagttcttctttaagttctagttgtaaaaactctctcatattatcaccaaactgcttagccagaagccccccgggaacaagagcaggggacgctacagtgcagtacaagcgcagacctccccaattggctccagcaaaaacaagattggaataagcatattgggaaccaccagtaatatcatcgaagttgctggaaatataatcaggcagagtttcttgtagaaattgaataaaagaaaaatttgccaaaaaaacattcaaaacctctgggatgcaaatgcaataggttaccgcgctgcgctccaacattgttagttttgaattagtctgcaaaaataaaaaaaaaacaagcgtcatatcatagtagcctgacgaacaggtggataaatcagtctttccatcacaagacaagccacagggtctccagctcgaccctcgtaaaacctgtcatcgtgattaaacaacagcaccgaaagttcctcgcggtgaccagcatgaataagtcttgatgaagcatacaatccagacatgttagcatcagttaaggagaaaaaacagccaacatagcctttgggtataattatgcttaatcgtaagtatagcaaagccacccctcgcggatacaaagtaaaaggcacaggagaataaaaaatataattatttctctgctgctgtttaggcaacgtcgcccccggtccctctaaatacacatacaaagcctcatcagccatggcttaccagagaaagtacagcgggcacacaaaccacaagctctaaagtcactctccaacctctccacaatatatatacacaagccctaaactgacgtaatgggactaaagtgtaaaaaatcccgccaaacccaacacacaccccgaaactgcgtcaccagggaaaagtacagtttcacttccgcaatcccaacaagcgtcacttcctctttctcacggtacgtcacatcccattaacttacaacgtcattttcccacggccgcgccgccccttttaaccgttaaccccacagccaatcaccacacggcccacactttttaaaatcacctcatttacatattggcaccattccatctataaggtatattattgatgatgtt

SEQ ID NO: 287 - DNA, 3030 bp, Homo sapiens
ccaggctccattattgatatagtcatgatctcctctgttggggatgaagtaggcaaatttgaggcactaatttacttctcacattcttttcttgaacagaaagatagaactggaaattaatagtagtatataaattcaaaattttagctttaataacatttaatcagacataaataattatggtaatgtgaatttcaataaataaattttagttctaatataagtgtaactgtgtaatattcatactttttctgaaggctttactaatttgatatggcattacttttttattgctgccaaaactattcttattccactgtgtggtgatgagaaagtgagagatgttctggagatggtgattatagatagcttccctgaagccatagtaaccccctggagaaaaattggacctggagtctagcagcctaggtatgggtactcgatttcttagaaagcctttacaatttcctttatcttaaaaataagggtattgaagtagaattctagaattttcagaggacaacttaaaatatgtgtaatagttttaattatttatcctcataaatttaactgttcattttaatatatttaaggatgaattttttaaaaagttgatttcataaaaacgggaatagaaagatggttccataggctgactgagagtgtagaggagggatgggaagggaaagaagttgatcttcagttagactagaggaataagttttagtgatctctcacactgcatagtgaacacagttaataatatattatgtatttaaattaaaaattgctaaaaaataaatattttatgttctcaccacaaaaaaagttggaaggtgattcatatgctaattagcttgatagactctctctacaatgtatatatagatcaaacatcacattgtatcccataacatattatatatattatatatttatattatatattattattgtatccattaatatatgcacttattatttgccaggcaaataaaaaatgtttttaaaatataaatttatttgtaacctccttttacttttctgcttggttttcttctttcattcagtgtttaccagtttcttatagttaattttattttaagctgtctcacattttctgaagaaaagggaacatattaaagccaacaaaacaaatacactatcttgcatgagatgatttatgtcatggtacaatcaaatgctataaatcttataaaaacttctcaaatggttagatggctacagttgaacagatggaccatgtcatatattttttataatgcttctaaggtatggctaatttttaaaaaatattttagtaatgatgggaatattatttatagaaatcttataaaatatataatgaaatatgtaataaagtctagataaatgtgtatatacataatatatatttattacataatatataatatataatgtatatttatatattacatgcattatatattaaatataatacattttatatattatatattaaaatatgtaataatatgttattaaatatatacaataatctattacattttatgcttatataatatataataaatatatagtatataataaatatacactatatatttgtatctatatatgtttataaagtcattcctctaattaggtcataaccattcaggtaaactggaaatttaagcctacttcaggtttgtggtaaatagattctctctgaactagcatattcagaatcattaaacagtcagttctttggacaagtcttatagaatgttcttacctcttcagccatcccaagactcttgagggcctgacctcgcttacactaaagcagatctgccttatgcatcactgaagtagggagggaagaaagtttgatgaactacttctgacccctagtggtgtccagaaaagaccattaaaggaatgacctttaaaggatggacatacaattttttgtccaaggcaggacatgtgtgggtgtctttcagtaattatgttctaagaacagcaaaaactccactgccttggcaaataggaatgttttagttctatagaattataaagaagctgtcttttaaacacaatatactttctctatgtctttggaacaatgactattggtcattaccctattttaaagtaagcaagtaatcacacagggaattattctgaaaagacagaaaaaaaaaaaaaaccaagagatttctgcatatgtaggtcagttttaatcagagggcatcagaaaagactcctgaaagaatgacctggttattataatcacagatttgctttccaagtcaacattccagacagtgctcagaggggatacgaaaacccttttatttctccagactcaaattcactgctatttgtcttctctatttattttattataggcattgttctggttgctgggaactcagactgagataccatacactgactctcagatagcataacacaacatgatgtcttggaaaactgtaaatctttttgttttttaaatacaggtggagcatctggcacacctgacatattgatcttgtttttctttaaatcttcatttatttaccttatcaaaactatgctctttcatcctacctttcaaaacatattttaaaaaatcctccaacatgtattttgctctggtaatcccaaaaggctgatagtctctatggtggcaacatggataatactgttccccatctagatggtctcatttcttctgtatctagtctgaagaagcctgaatgaaagtagatttttaagctttgtagctagtctgaagcctttgtagtcagtctgaagaaacctgcatgaaaatagattttttttttcctttgggacagagtcttgctctgtcgcccagactggagtgcaatggcgcgatctcggctcactgcaacttccacctcccaggatcaagcaattctcctgcctcagtctcccaagtaactgggattacaggagcacactgccatgcccagctaattattttttgtgttttagtagagacagggtttcacc

SEQ ID NO: 288 - DNA, 29986 bp, Artificial Sequence
  HDAd35-T4-Ef1a-mgmt-mCherry
  misc_feature (1)..(481): Ad35 5'end
  misc_feature (14126)..(14159): FRT (Complementary)
  misc_feature (14220)..(14463): pT4 LIR
  misc_feature (14478)..(15812): Ef1a promoter
  misc_feature (15830)..(16450): mgmt
  misc_feature (16451)..(16522): 2A
  misc_feature (16526)..(17230): mCherry
  misc_feature (17259)..(17380): SV40 pA
  misc_feature (17491)..(17756): pT4 RIR
  misc_feature (17863)..(17896): FRT (Complementary)
  misc_feature (29579)..(29986): Ad35 3'end
catcatcaataatataccttatagatggaatggtgccaatatgtaaatgaggtgattttaaaaagtgtgggccgtgtggtgattggctgtggggttaacggttaaaaggggcggcgcggccgtgggaaaatgacgttttatgggggtggagtttttttgcaagttgtcgcgggaaatgttacgcataaaaaggcttcttttctcacggaactacttagttttcccacggtatttaacaggaaatgaggtagttttgaccggatgcaagtgaaaattgctgattttcgcgcgaaaactgaatgaggaagtgtttttctgaataatgtggtatttatggcagggtggagtatttgttcagggccaggtagactttgacccattacgtggaggtttcgattaccgtgttttttacctgaatttccgcgtaccgtgtcaaagtcttctgtttttacgtaggtgtcagctgatcgctagggtatttaccggtattcaaggattacatgagcttagaaatgtaattagcatagtgtgtggcatagtgtagataccaaataaatatgatctctccttctactcttgaaaatgcaaacacattcttggtggtcctaaaatagcctgtaacatggtttactcagcagcatttgctattcaaggcagatctgcctttagtcattggctgcgctcctgaacagctgtgtgaaaggctaacttttgtaaaccaaatcaaaataaaatgcagcaaaaatttgtcactgaaaggaaatcctcagtatatccttttatgaaatgaaagatccctcatccaaacttaacttttttaaaagtgcgcatttggagatatagccctttcttatgaatcctaattcaattttggccataaacacacgttgatgttccccaccccaaagcacatagcaacaagagtaggttctatattgaaaataatgacaatttaaaaacatgtacttatttcactgtatgtggacagtgtctatgattgcatcatgaagtgtcatataaccatgtacgtgtacatgagagagagatagagagagaagtggtagggtggtggtggtagaggggatggcgatagtaatcatggtaatggtagaggtgatggaggtggtaatgacggaggtaagggtggtagtgatgatggtggtggtggtaatggtggtggatgtggtggtggcaattgggatggtgggatggtggtagccatggtgatggtggtaatggtgttgatttaaagggtggtggtagtgaaggtgagggtagtggtggtggaggtggtggtgctggtagcaatagtgatggtggtgatggtgttgatgagggtgttgggatcagggtgagttcccacagtatatttcattcttgttgtaccactctgtcaacagcaccactgactgggacagaggaagaaggcacactctgaatgtgttattaacagaaacctcaaaacagtctgtctccttgtagtcattcaaaattatctttttcttacctggaaaactgaaactgaattaccgggaaaaacacaggagatttttgtttgttaatatgctgccaataaagtaattttatgtcaaatttaactacaggaaagggcaaggcattttctaagttccttagatgtcatgtggctaaaaaaaacaaaaggatggacagcagttagatactgtacacttagctgtttgaagccatatattcagaaagcagatgttgggagttggtgtttgaggactgatttcctggaggtattttatataggccaagttcattgttctaaactctaagggcttgacttgagggaggaaaagaggcaagaacatgtttagttttgctgacagcatcacatgggcagccctaaggctagacaactttagggcctgaagcttattctaggaaagaagcacctacagagtggcactgggctcccctccactatagagatgaagtcatatgacagtaaagggcaggcagggctgcctagggggcccagaactgacacttccattagaatgagcacaggccagggagagaagtggggaaccagagagaaggagctggaattctagtaggacaaacggtaagtgaacaacaagaacaagttaagagtgtgtgcagtattctttcaaagactgaaaaaatagtgatgtgatagaatggcaggtggctctgagcaggccaggagaaggactgggggcagagcatcccaggcaggagggcagcaagtgggaaggccctggggtggggcttttggactgttccagtgacgggcaggcagccagtgtgcctgtcacacaatgcaccagggaagtagtcgtgaatttgcagagggtcttgcaggctatgggaaagggattggattgtattttgtttgtagggaagccatcgggggacttaagcagaggaaggattggcttcatctctttgaaaaagttctctctggatgctgatgggaggagaaatggaaggaaaagaaacacttttaggggcaagaacttttgagaagggtggaattgggagtgtggagttggggccagctttggcacaggaggggaagctaaacacgtggccgcatgagggcctgtaattctacctgaaatgggtaccatttgttagggtaaacaaatgaaccaaatgcccagtgatacagaccaagtgttggcaaacttcttctgtgatggcccaggtagtaaatgtctcaggcttcgcaggccatgtggtctctgttgaagctctgtgtagtagacaatatgttaatgactgggcgtgactgtgtgctaataaaagtttatttacaaaaacagcccgtgggctggatttagctcacaggctgtagtttgccaacctctgacctagagcatgaactgagcatcttcttggagggaaataagttctttccaagttgccctcctcacattgcagggggccatgtaggcccattattcacagaagagtgggtgggcaacctttctggagcagaaaaacgtaaagatttcttccgtagtgcaagtaaggtgaccatttctaaaccgtgcaagtgatccagcagtcccaaaagttgtttcacttctcattgtgcgcccgttctcaggtgctccgaagcttccagtcctttgtagggacatggatgaaattggaaatcatcattctcagtaaactatcgcaagaacaaaaaaccaaacaccgcatattctcactcataggtgggaattgaacaatgagatcacatggacacgggaaggggaacatcacattctggggactgttgtggggtggggggaggggggagggatagcattgggagatatacctaatgctagatgacaagttagtgggtgcagcgcaccagtgtggcacatgtatacatatgtaactaacctgcacaatgtgcacatgtaccctaaaacttaaagtataataataaaagaaaaaaaaaaagagaggagagaaacatcatcccctccaggatacccttgggccttgttcttatagtcttgtacattgttgaacaatttgcatgggctagtggattaaagcacaccctccaccctcaggccctcaagggtctctatgataatacagtctcaccttctaccctttccatcaccatcctaggtgctatggccaaccttgaggctgccatgttaggtctatgcatttcccacctccaccacataactctctgaaggccaggtagtttcctattcatcttggtaaccccaaagcctcgtgacagggctcagctggcatctgcggatgtgaatgaaccattggagaaaatggtactctgcaaataactctgttattttcccatttcctgtgtaaggcctagagacaatgactttttaattgcaccccttcccctctgtatgacactggccttctcttgtgtccagcaatgtgggtggcctagatgatttctaagggacttctggccaagatgaacagcagctgcatcttactgagcatttactatgtgccatatactcagccacagctctaggggcatagaagcaggagctctcagggtcagggcagtgagtgagcaagcgagcacctatgccagccctgcctctggatggggacttgagagggtgatggaagcctgcagcactggagggaggcagacaaagacaggcctgtgctgagggggcccggagcaagagagagggaggcaatgacagcagagacatgcctgcgccttgggtttgagtgcccagtggtcaaatccacttccctgtggctgatgcttgcctttctaactttggaatttaggggttggagatctggtgagaaggtaggagggagatgaggaggagaagggaaaggcaggaaggaaggggagggaaaggaaaagcaaaaggggaggaggaaggtttccaacaaattattctatatcaactgcggaaatcaaaatttgttgcccaaatcttagaagctcatgtccctcctccccagaagtctggaatgcagcactccaggggtagcttataacccaaatatctatctgtaaaaagagaaacattgggctttcgagctgtggattctcagtaaaagcaagaggcctcagcctacacaggccagcccagagtttgaggaaccccaggcccacacccacagggctggcccctgggtctgcatactccctagaaatgtgcacacttctgagcctcaactctgtcctggagtctaacagcatccctctccttcctggggcagttccacctccagaaacctgttaccttgggccttatgtcaaggaaactgtgggaaagagctaggcaggaatgcagatgaggccagcatgggctcctaaaagtttagaaataggcagtgtcatgctcccaggtgcctgcataaaccagctgaaaaatggagctcccctcaccagcactctcccttcaaacagactgtgatttgcaggtcactggtttaccaagccaggctacccaggcaggacccagatgccaagcccagtggtgtcctgcaagctgagcagtgctcagttcttgcaaaaaaaggtctgtgtgaaggcaaggcctctgcctggcttctcaccccagttgggtgtctggaacaggaaggagcccttactgcagaaaaaggaggagggagcaaagggagcgaacagctgcgtgctccatggggaggatccccaaagtagaaaggcgcatacacactgcagcccttgacccagaatgctcacagctacattacagattcaggtctcctcagtgtagtggggctgctgatgagactgtggcatcctcaggggtcaggacacacattttccatcactcttctgatggcaaaaaacctctgagccaatgccaacctctgatcattaaaaaaaagtgctcacagcagtgtgtggtttaggatcatgccctgtgtggtttggaacacgtgcacaaccacaccttgttcatcaccatcccagaaaccctgacgcaggcaaagagcagagttattaaccctactttactgatgtggatactgaggcccagaggctcatgcaagttatcaataagtggcagggacagttgcctctagattaactagcccctaggatcacctgggtcttggaaggggacccataaacatgagctcccctctcttggggccagatttgcacctgtgccgcgccttcagcctgcatgaagtaggggctgctggcaaagactcaaagctgtaaatctgggttttctcttgaggcttctaagggagctgtttcgacaactcactctgttcccagctggctgcccctgcatagggttttaaagcagcctagctttctgccaggcttggcagtggacaacgctggtcagaacatcccagagagctaccagaatgaagtaagtttgcttctactctttacctgtttatgggctgtctctgccactggaatgaaaggcactgagaacagtgcctggcctgcagaaggccctggaaatacctgagctcctaatctgggaataggagtaggaagagctttggaggcagggcacctgagtttgagatctacaacttcctgcctgtgtgacattgggaaagtctccatcctttctgagcctcagtctccaccctggggaagtggaaatatcaatctctgtgacacagaagcaaatgagcgaatgtgcacaaagtaccttgcacaagagagacgctcaaacacttgcctccaggtttcaccgagaactacagagtaagatagatttgttcccagtggaggaagcctgggaataatttgcccctagactatgaattcctggggctcaagatcgagcacagggccaggcacacagaagggaccctggaaatgtggcaggaggccagagatagacaggcccttagagctcatacccatgccctctgacctcaagaagaaagaaacctgctcaaaatctcacaaagagcttgttccaaccctgaatcgagtctgaggactccttcctgagtccagcactttttctgcaagaagtatatgcctccaaagctgatgggcgcaaatcttgaaccccgtcacataaacacaaagggaggaggtgactagagctcctcctactggatatgtctaaggtcaccagtctaaagaaaagggatggatagaatgaggccagtatttttgcagccatccaaatgtccacatacgctgttacactgagggctcctctctcccccgtcttcagccctacttgcatttagaggtgagaaagatatgggctgaggggttgtttttcatcgtattgtagatggaaagcacactgcccttggggccatccaaatgtggaccttgatgtagcaccccaccttctggatggccatccttctgaaagtcactgaatttctcagactttattctctttatccataaagaaggagaataataataatccccccaccctgcccaaccactgactggttgggaagctcagaagaaatactgggcacggcatcccattgtaatctatagagtgagtcgcttcttaatattaaatggctgaacacagaagatgtgcaaaaagtactgtgtccccttcctcctccaactgaacatttcatgccctttgcaccctcattttgtctaggagctgccttatgaagggaataggtacctgctccgagctggaggaatctttgccacttatggtggggtatggactgagacagagatggcatgtgacatgcgcactgagtctcaactccatgcaggctctggagcactctcaaattggagtactaatgccttttaaattctcacactagcaatcctttgacctactgatctagggatctagggaaagaatcgtgatcttaacttcaaagggaaggacaaaatgttctgcctcctgttaaaactccatacactaagtgcagagactggatgccttattaaccttgggtagatgcccaaatgttcaaaaggtcaaactcttctgttccccagatcgccagagtcattaaccagtcacactattaaatgaatgaacagatgctgaaaaggtacttgcattactgagatttcttatggtgatggcccctgcctgatatgtattcagcattttgtagttttcaatgtgcattagagtatagtggtgatgacattggcctctgagtttgccacttcttatatctgtgactttggtcaaattgcttaatctctctgagtctcggtttcctggagataataatagcttcttcttcccagggttatcatgaggattacaggagataatgccccaaaaatgcttagtaaagtgcctagcacctagtcaatgctgaattaaaggtggttattcttacttttcgttcatttgaactttgttctcagggagggcaaaggatagacaaagccccatagctagtgaggagtagctgcaagactagaacccaggtgttctgagccctagtcttaggccaagaacaactgttacgtgagatgcacgttttccttcaagggagctcacaattatttccatgtaaattcaaggactgctaaaagagaactctcctctgggactgatatcattttatttcaagattgatttgaaacatgttttttgtttgtttgtttgttttctaggaaagaacaagagaaccagttaagctgaatgcctgaagcaaatccctgttagcgatgttttcaggatgagggagagtggtgcaagaaacgtgcttccagatgcacatggtttcctgggactagggttcagggtgtcatccctgggtgttattaagtgtcagaaggagagcaaacaagggaaacatctgagatccagctaaggctacaccctggaaatgcaagcccagctcttgcaaaggacctcctttggccactcaccttccaggccttacaataacttgtttggactgcaggtttcttggtggactcacaggccattctgcttttatttggtcaacctcagttcacaagcacccagatgctgagatcctcagcatgtgcagcagagtttcatattagcactgggtacctttctgaggctacagggataccgtacagcagcacctgtcacgtccagccaaaggagtgggctctctcaatgtcatccaatgctgtttcaactgtgaagaagaccatctgagagagttgcttttggaggctgaggcaaatttttaaaattctttgttctcctcaactggggtgaattcttggtcttctaggacagcttgaagttttagaaagagtcaagccactcagaaccaacagagaactctttcagagaacaaggtgtggcatagaggaggcagagggctgatcttgatcaaatccaaagtgtgactctaaagcaatgaatgtgaatttttggcaaagcttacaaagggctctaaaggccatctgcaaagagaagccaagcctgatcgatgaatcactagtgcggccggatatcgatcggcacgctgttgattttctcatagtaaggaacagtgggccctttcagtcccacttctgtagtctgtggtactacaaatggtgagcccatgatgttgccattcatagggttattctccagcagtaatgactggccagccactcccatagccgcggggctaggatttattgtcaatggagggacctgcagttctgcacaagcagtactaggatgagcacctgggcccattgcaagggtgacatcttcaaggcaaggcctcttaattttattagggtagcccccatcagccatgtctggaaactggaagtggtcttcttcttgtctcctcttaacagttccctgtgaatggaagagaagagaggaggagaagagaggagaggagaagggaagagaggtgacacacacacacacacacacacacacacacacagagagagagagagagagacagagagaaagagagagagagagagagaggaatttttataaaggtttggcacattaaagctaatgaacaggaaatgtgcatgataaaacagacctctcagtttaaagacttatagttgtgaaaactataaaatacagcctgtctttggaaccatagtgcttatttattcattattatgtttcatctaaactgtctaattacatttcaaataaggcattatgttgtctgtatactaaaacgggatagaacgttattcaaagggtaatctgcccacttcaaggagagttcaacaaaactatgcagaagtcactaaatgaaccatgctgccaaaggcaggcattggagagaaaactagaagtagctaaatagttttaattctttcctgtctacagacacatagattttaacgaaggaataccatagtatagaattgaacttttaggctgccttctagtcttggttaaatgcatcaggctgcagtggtaaaattgaatacaacagagcccttacaggaaagaagtagatctggatgtgttttcttggggagctgtttaaaatactgtttttgggaaagcacaagtttcagaacagtcattgtaggcatcgtattcattgttccatttatttttacacacacacacacacacacacacacacacactctcacacattgctatgtgtacacaaaaataatttggaagaacctatacccaacaatttggagtggtcatttatttgggatgactggcaattccctttctattctcttcatttctgcttgtttgtctttaacgagaacgactcataatccaaaaatttaaaaaagtataaagttatctaaataagaaattttcctctgaagatgcatcctcaggttggggagatattaaacaatgagaaaaggccccaatctgggatctgaaccttgggggagctgcccatcatttatagaagcacagcctttgggaacaaagcaaagtcactagcaatgtgagacttcctactcttcatggcttcatacagtcatccatcgctgttgtgttaatgaccatgacctgtatgttagcaggtaaatgggaaaggaagtgggggcaaaggagtatgtgcaggaatgatcaaaataaggaaaggaagagagggatctggaaatcacctgaatgccgataggtgaacaggtagaattcttttaaagcttcccccacccggtaccccccaaataacccctttccagctttggaagtttcactaggacatacagtgctcatcctctgatgtcaccttaagtttggctcttctggtttgatgagcttgtagcccactaggagctcaaggcatgcatggggccacttgccagcacgatgaggggcatgactgtcatggccaagtgaacatcaaagcagatccccagggctgtatgtctcaggccttggtgcacatcagaatcacttagaaacatccacattcctgggccctcccaccacaaactgacagcttcatccagggtgtggcccaggcatcgggagtttttccaacagctccatggctgattctcaacagaaaaccactggcccagagcaagggtggaggcagcgtggcatagggctctgaccttggccttgccactgaacctctcagagccccagtttctttatgtgtaaaatgagtgtaattatagttcttttctcatgaaggtgctctgactattaagtgaaacggggcacattgtatgacacctaatagctcctcactaactggtacccggcattataaagggcaggtatggaagggttctgggagtccaatacccttcttaaagacagagaggtctctgagacccagagaggggcaggccttacccagagttgctcagccagagggcaacaaggcccaggtcagatgcagggcccctccaccaccactcagctgcctccagacccactgccttcgccatgttgttggtaggacactgcatcgcccccacagaaggggcttgccaacttgagtgagaggacttgcacacttctttgacttttcttttgagatgcccacaatctgaacaagggcacttcaagggacagctctgtcaccaaactcatctgaggcctgaataccatgggtcaggcaggaatgggttggagaggtgtagagcaggcacaataagagggctgaggcccatgcagtcatcagtgcccactttcccaggagtctgactgggcacagcacccatagtgtccctgagctggtccatggagcagctcactaactgtttggcccacagcaggtgctcagtaaatggcagttgaacgaatcaatggacaaaggaacataaattacccaacacacagggagctcagccatttactcaatccattatggagtaacctacaaacaagccactgggtcccaaactgaaattgtgtctcttctacattctcccaaagaatccaataggttaaaaatagaaatgtatgaaatagatcaatcagggatgattgcatgtggatttgacataaggatcccctgcagggagtctgagctggcaacagtcaggcccaaagtgctgtccatgatgtctcgaactgcaagacagttttaacaatggcgaagcaatgcagaaccaggcaggccaaggagggggtgggggttggggaaaggaagggagggaaggggctgtgaggggcaatggtctggcatccctgccacgtgagcctctgaaatttgctggcagcttctatgggctcccagagctttcacttaattgttggtctgccactaacctgctgggagtaaggtgcagggatggaggaggcagggcatgaccaccagacactaaaggtaccagctggggccactggcaaagggaaggaggctgcacctctcctacatgagagcccgtatacacacaccttttccagcactcatcaactgcatcccaagcaaatggtccctgatcaattccaattctagaaaccaactgactactcaataacaaagtagatcccagcaggccgccactgctggagcggatgccacttttgctatgccaagtctgtggctggacagctgctggcatgtacactcactgactttcataaggatgcctaataaagggggcaggctcacctggcttttctcaggggtggggtttggggtgccgatagaggctgctgttttggcagagtggcaagctgcaagcctcttctgagctttcatttttcaatggacttcagtgagaattcactttgtcagaggccatgcagctccatgttttggatttcatggaatgagctttcaacagtgagcctgaagtgccctggctgaacagcaagaacaccagccaaccctaaacaaggccgaggagaggcggctgtgtttacacggaaggctcagccttgctgtaatagcgtctgccttcaccagacatcagtgaggcgtggaaatctattatccagttaattttgcccctagataaagacttgctttcgtgtcttctctttcacagtcccatgatctgttactcatctcaactgcgagaagttggctgggctttcccctgtgcccagtgccacactcgtgccttcactgggtcacctgtgcctgtggctgatgccgctgaggttttgcctgcccagactgggtgtttctgactaaatcccacagccaccattttagatcaagggcaggagatagctcactgctccggaatgacctcccctcccagaatcctggtaggggcggaaggtccccaaccaagctcccagccctttctaaatgaatctccctgcttcacccatgtgcttttctccagtctctgcggtcttgatgacagcagggtattagtcctagctgtcccacagctcctacttctttcaggcctctccctgtgacaatcagtagccactggcaggatttcctcagagcatatctcgatttgctttcagacaattagttaaaaggacactggaccccagacgtcccaactcccagccagagccctcacaggcccggcctttggtggtgaggaagggggagggagtgagtgacagtgccctggcatcttttagaaacgaattcctttctctccatacataaatgcctgcagagtcccatttcagaatccggcagacaaagccaccaatgtgatccccatgaccttataaacattcattaaaatgcatttcaaggcatgtgatggcctccccaccccctagataatgagaaaacaaaggtttctcttctgatagagacaagttcagctctgaagtcaacattatttctggttctgtctgaacaatgacatatggcaactcttccctttctatagttctagtccagaatgacaaaaaaggggaaaaatttcttagagaaggtagagattatacgaatacagtccatgaaatgagcataaggagaataaagaatataacttatccaaagaagtctggcaggctgttataaatgcttgattttggacactgtagttggaggtttaacatggacaccaataaaaaggtcagcaaagggtatgcactgttcctattgggcaagaagataggaggtcaaaggtaaccaggaaagataaactcagggagacttattttccctccagagggcactgggcttgtaggccctgggcaaaattgtcaaaaaggtgaaaatcgcctgtggtttatttagtctgctctttcttcactagtgcctcaccagttcagttcaggccaatttgctagaaggtagcgaacgatcgaccggtgaagttcctatactttctagagaataggaacttcggaataggaacttctacctagatgcatgctcagagcggcccctagctagcgtttaaaacctacagttgaagtcggaagtttacatacacttaagttggagtcattaaaactcgtttttcaactactccacaaatttcttgttaacaaacaatagttttggcaagtcagttaggacatctactttgtgcatgacacaagtcatttttccaacaattgtttacagacagattatttcacttataattcactgtatcacaattccagtgggtcagaagtgtacatacacgcgcttgactgtgcctttaagcttttaattaagagtaattcatacaaaaggactcgcccctgccttggggaatcccagggaccgtcgttaaactcccactaacgtagaacccagagatcgctgcgttcccgccccctcacccgcccgctctcgtcatcactgaggtggagaagagcatgcgtgaggctccggtgcccgtcagtgggcagagcgcacatcgcccacagtccccgagaagttggggggaggggtcggcaattgaaccggtgcctagagaaggtggcgcggggtaaactgggaaagtgatgtcgtgtactggctccgcctttttcccgagggtgggggagaaccgtatataagtgcagtagtcgccgtgaacgttctttttcgcaacgggtttgccgccagaacacaggtaagtgccgtgtgtggttcccgcgggcctggcctctttacgggttatggcccttgcgtgccttgaattacttccacgcccctggctgcagtacgtgattcttgatcccgagcttcgggttggaagtgggtgggagagttcgaggccttgcgcttaaggagccccttcgcctcgtgcttgagttgaggcctggcctgggcgctggggccgccgcgtgcgaatctggtggcaccttcgcgcctgtctcgctgctttcgataagtctctagccatttaaaatttttgatgacctgctgcgacgctttttttctggcaagatagtcttgtaaatgcgggccaagatctgcacactggtatttcggtttttggggccgcgggcggcgacggggcccgtgcgtcccagcgcacatgttcggcgaggcggggcctgcgagcgcggccaccgagaatcggacgggggtagtctcaagctcgccggcctgctctggtgcctggcctcgcgccgccgtgtatcgccccgccctgggcggcaaggctggcccggtcggcaccagttgcgtgagcggaaagatggccgcttcccggccctgctgcagggagctcaaaatggaggacgcggcgctcgggagagcgggcgggtgagtcacccacacaaaggaaaagggcctttccgtcctcagccgtcgcttcatgtgactccacggagtaccgggcgccgtccaggcacctcgattagttctcgagcttttggagtacgtcgtctttaggttggggggaggggttttatgcgatggagtttccccacactgagtgggtggagactgaagttaggccagcttggcacttgatgtaattctccttggaatttgccctttttgagtttggatcttggttcattctcaagcctcagacagtggttcaaagtttttttcttccatttcaggtgtcgtgagaattcgatatcccaccatggacaaggattgtgaaatgaaacgcaccacactggacagccctttggggaagctggagctgtctggttgtgagcagggtctgcacgaaataaagctcctgggcaaggggacgtctgcagctgatgccgtggaggtcccagcccccgctgcggttctcggaggtccggagcccctgatgcagtgcacagcctggctgaatgcctatttccaccagcccgaggctatcgaagagttccccgtgccagcgcttcaccatcccgttttccagcaagagtcgttcacgcgtcaggtgttatggaagctgcttaaggttgtgaaattcggagaagtgatttcttaccagcaattggccgccctggccggcaaccccaaagccgcgcgagcagtgggaggcgccatgagaggcaatcctgtcaagatcctcatcccgtgccacagagtggtctgcagcagcggagccgtgggcaactactccggagggctagccgtgaaggaatggcttctggcccatgaaggccaccggttggggaagccaggcttgggagggagctcaggtctggcaggggcctggctcaagggagcgggagctacctcgggctccccgcctgctggccgaaacctcgaggtgaaacagactttgaattttgaccttctcaagttggcgggagacgtggagtccaacccagggcccatggtgagcaagggcgaggaggataacatggccatcatcaaggagttcatgcgcttcaaggtgcacatggagggctccgtgaacggccacgagttcgagatcgagggcgagggcgagggccgcccctacgagggcacccagaccgccaagctgaaggtgaccaagggtggccccctgcccttcgcctgggacatcctgtcccctcagttcatgtacggctccaaggcctacgtgaagcaccccgccgacatccccgactacttgaagctgtccttccccgagggcttcaagtgggagcgcgtgatgaacttcgaggacggcggcgtggtgaccgtgacccaggactcctccctgcaggacggcgagttcatctacaaggtgaagctgcgcggcaccaacttcccctccgacggccccgtaatgcagaagaagaccatgggctgggaggcctcctccgagcggatgtaccccgaggacggcgccctgaagggcgagatcaagcagaggctgaagctgaaggacggcggccactacgacgctgaggtcaagaccacctacaaggccaagaagcccgtgcagctgcccggcgcctacaacgtcaacatcaagttggacatcacctcccacaacgaggactacaccatcgtggaacagtacgaacgcgccgagggccgccactccaccggcggcatggacgagctgtacaagtaggcggccgctcttcgagcagatatcataagatacattgatgagtttggacaaaccacaactagaatgcagtgaaaaaaatgctttatttgtgaaatttgtgatgctattgctttatttgtaaccattataagctgcaataaacaagttacgttaacaacaacaattgcattcattttatgtttcaggttcagggggaggtgtgggaggttttttaaagcaagtaaaacctctacaaatgtggtattaattaaagatctttaaacaatttaaaggcaatgctaccaaatactaagcgcgtgtatgtacacttctgacccactgggaatgtgatgaaagaaataaaagctgaaatgaatcattctctctactattattctgatatttcacattcttaaaataaagtggtgatcctaactgaccttaagacagggaatctttactcggattaaatgtcaggaattgtgaaaaagtgagtttaaatgtatttggctaaggtgtatgtaaacttccgacttcaactgtagtttaaaacgggcccgtagtctagggccgccagtgtgatggagttcggcttcaggtacagcacactggcggccgttactaggtagctagagccttcagactctagggaagttcctatactttctagagaataggaacttcggaataggaacttcacccatggcgatcgctagcctctaactcctagaccgtcagaactgctgggcccttcaagacgggctgctcacacccactcatgttaagcctggtgaggcctgtactctgttttcacaggaagaaatcctcacccagtcttccccaaacacattcccaggttgtgtcattagtgggatagagatgattattgtggggagaagagaaacatctggatggatttggtgaggttgatctatagaggaagtaggtgctgcctgaggtagctgtaatagaagctaaaggtcaaaggagagggccctgtcccaatccagatgactccacttctgctggacccaggttcacaagcttaatctacatttcacctaaatttggctaacaagcccaaaatcacacaggcaaagggagaagtggaggcagaaccgaggttggaggccaccagggccaccgggcagagatcatttaagcccaaccttctcacttctccctgggctctgcctctcttaaaggaccttgtggtgtgacctcttgtaggtccctttcacactcggggcctcagtttccccactgtaaagtgaatgggtcccagctttggtaagcttatgcttacctgatgctttcttcctgggctgctcttgtagagaaaagataaatcttcttcctccatccacgagggctcctttccctgggggtgagagtaggctgaggagagccacttgcacacacccttaaagaaagtattacctgcaccagctcagtgagaggcacagatcagactgttacttgaatcaaattatgagcctccccaaatatatctatgacatttaaataggggattacttgaacatagactgtgggatccggtgtggagtgcgggagactagcaaagtgaatcctgagagtagcaggtctgcacctgttggatcgagaaaggcggcctacaattctggtcaaatgagctgtgcttattgacatattctattagagagtactaccaggtcaccagtcaccagaaaggctgccagctctccaaccacctccagggaactatcctgaatggggccttaacaagtctaagagagggttggtttgggtcccaagccaatatttgctctgctttatgtcagtcatatggaacccaaaccaaccctctcctatgtgcctcaccagtcggtgcagggatcccaatttcaagtttggttttttatggtcaaagtccagcatagattaaatgaaggggtgtgatgatggtgttaaaagagaactccagaccagtttaactcttggacacacatcccatctcaccatggtgcttccaaccttccagagatgatgggctcctattttctgatgacaaagccctccacaggattgctgcctggccatcagggagtgcctctgtaactgaggctgagatcccactttcagtcctccagctgtggcccatccctgctccgcccaccgggtatggcctgtcctaggctcttaggtatggctgcattgtgaaatgatggctacagagctggcatctcctgtagtctggttcatctagtgcactacctcatagttaaaagaaatctgtttaagccactgagggtggctcctagtgccaactccaagaacaggaagcttcccttttttgggaggaggggcagatggtaacatggatcgtccaggtcaatgggagcagggcaaccacagtaagtactggacaacaacacaaaactccatgtgtggcttccatcgagtccctctccaattggtttggtcttctccgtcccatgcagcactttagcaaggggcctggctgaaggctatgaattgtgtggagcctcctcattgcagtctccaaccatctgatgctgggaaaatgtcaccaggatgcagccatgccgtgtggccaatgaaccgagaaaacaccccttttctagaatgctctaaagaggcagaataatccagaggtgaggaaggaaatactccaccagagacccaggcagttcctacaaaagccagactttccttcacctagggagtgacaagaccagtggaaaacactctcaagcagtaacccccaaatgctctgcaagccagtggcgtccagataccgcacaagcgagtgggctgtctaatcccatcatcatgatgtaaatatctctaggctgccctgggctgtgcctgaccctgtcttcagctttccacacctccacctacagcccatgcacagaaggaccacccaggaatgctgcaagtgtggcacctccagggccacccagggagaaggagggcagctatgctggtggctccaggcccatttggcgggtggtaccttcacaccacaaagcccaaactgaggccccagatttggctgatgagggcatattggacaggggtcacttatgctcttccccattgccacctggcctctggctacctggacttggctacctgtggatcctctcacaggtgccaccatcttggctgagtctccagatgcgaggtccctgaggcagtggcgggcttctcgctaatgctgatgggattaggaatgggataggtggggagggccctggactgggccctgatgagccaagtgggtttttagaggggctactggtacatttcagggacaggacatctggtagagctaagctggggcaataaggagccactgctaatctgagagctagaaacaatcagcttctgggtcattattaattagggtagtttgggctgtgtggaagtcacgtactatatggggtagccacagctctctctacagataatctctaagacttctgattgggactgtgtgaatgcagtagcaatatctcttcttactgccaggccctgccagtcctgcctccacgccctggctggccccccttatgatctgacccatgccaggctgccatagtatgttacttctgcattagcactccttgggacctgcctctccactgtccctcagactttaaagaactatacaaacccaaggggctcttcccaagagaattgatatgacttgaggtgattccatttctggaagtagtcactccattttctgcctcactctttcagtgcttcacagagcaggttcgaacgaaggagccatccaactaaccgtcatgttcgggcaaccgaagaagggagtggcaggatttcctttggagacttctggaattagacagcagtttaatgcaagcatctaaattctctccctcccagagtctcattaaaactacagtaagagtttgtgttttgttttgtttttaaagacaaaatcccaccaggatagagagaataggagaggagataacagcatcataatttatgaaactaaaatgcagatagaccaggattaactgactacacagcaccaaggaagctgaatcacaagacagcagaggagaaaactggaaaggatcgtggtctatacggcagaatcttcccaagcctcaggaggaggagctctagatgttcccagatctgggaggtaaagtggaatggggggacatggtcagcgtaatggggttgggctggaagcaggttaaggagcaggcagatctctgaatcccctctctgactctgtgtccccaggcatctgcctgtcccccaccctggaagaggtctggcttgaccctttgtctggtgaatttcctgctctgctttcctggtcctgctggccggatcagtggaggccactcacttcaccccacagggatgttctgtgttgccctacacctgggaactggaggtactggaggcaggctgtggtgagcttgaaagcaaaacacagagggcagtccaatctctttggccatatttcttctgcatatccaataccatgtccacaactctgctagtgtcctgatggtggtgggctctacacattcccgggaagctgaaggcagataatgaccaggacaggtcaacctctcttcttctgaaagccttcatctactaatggcctgggactcttcccttaaatgcttagattgtgtcttccactaaggttttttgctgttgctgttgtttgtttgtttgtttgtttgtttgtttgtttgttttgagacggaatctcactctgtcgcccaggctggagtgtagtggcacaatctcagctcaccacaaccttcacctcctaggttgaaggggttctcctgcctcagcctcctgtgtagctaggattacaggcacatgccaccatgcctggctaatttttgtatttttggtagagacaggatttcgccatgttggccaggctggtcttgaactcctgacctcaggtgatctgcctaccttggtctcccaaagtgctgggattacaggtgtgagccaccacacccggccaaggtttttgtttgtttgtttgtttgtttgtttgttttgtattgaggcagggtatcactctggtcacccaggctggagtgcagtagtgcaatcacggctcactgaaacctccacctccctggcgggctcaggtgatcctgccacctcagcttcccaggtagctgggactacaggcttgtaccaccactcccagctaatttttgcgtttttagtagagacagggtttccccatgttgcccaggttggtctcaaactctgggctcaagcgatctgcctgcctcagcctcccaaagtgctgggattacaggtgtaagccaccgtacccggccccgccactaaggttttgaaaatgaagcaattacaagtttaagtctattaataagtgatgaagccatgtagaaaagcagaataattatcttggatcaggaaggtcacatgaggatctacttgggggttgtcaatattctatttcttgacctgatcagtgttgacagcaggttttaattttttacttctttttgtttgtttgtttttgagacggagtcttgctctgtctcccaggctggagtgcagtggtatgatctcggctcactgcaacctccgcctcctgggttcaagctgttctcctgcctcagcctccccagtagctgggattacaggcaggcaccaccacgaccagctaatttttgtatttttagtagagactgggtttcaccatcttggccaggctggtctcgaacttctgatctcgtgatccgccctccttggcctcccaaagtgctgggattacaggcttgagccagcgtgcccggcccattttttacttccttattaaactgtacatataggccttgcacacttttctgcatcaatgttatattccacaataaagggaaaaggtatatacacaacttgataccagtaatgtgaaacatatatttctacatagaaaaaaaaatgactgaaatactgcactccaatgtgttcacacagtagttgtttctggattatttatatattaaatgtttatatattgtattatgccatgaggtttgtgttttctctccacttttctgcattttccaagtttactacaaagagcacatattactcttataatcagaaagtcataaaatatatttaaaaagacaaaattgaaactaataaggatcaacacaaaacagatgagccatctgtggaaatccgcacagaatactacctaaagagattggtgacgtgcatgatctcactaggatgagcacaaagcttgccagagcctagggtctatttctagggttggctcttggaagccaggatagttgttatctctgggaagagggaggggcacacaaggggcttctaaaacattctgaatgttctatttctgaacctggttggtgggtacatgactgttggttttattattatatgttttatatactcttccgtatgtatggtgtggattccaaaaaaagatttcctttagagaaaaccagaatcacataagtagaaaatatggtgctatgttgaaggaacaactcaagtttatataaaatcatcatcatttataggcttaaaaagttgctttggaattttggtctaactgacttgtcttttctgcagcaaaccacgctccttctggacgtgctccaggcagaggggattagggtgggttcaaggctgcaagtacctagctcagcacactctcttcaggggacttagagtttgtctggtgttggctctctgagctcttgtcaggaatgccgacccttccgaggttcaggatttgaagcctgccttcccaccccagatttggtccacacagacactcaagtatgtatttcaactacaaatgacctgtactttcctattactcctctctttcatggtaacctttctggtatccttccttccctacatttatgggagggggacatcattctctgctctcctgtcactgaaggctccaccttctgtcttcttctgacccatctggttttcctggggccacctcctctccttaccaccctaacgcttttgtaacttgaggagaaatgagagatcacctagtcaggtcatcattctctgtagatgaagaggcccaatggtttgctcaagaattgccaagcgagttaaagacagagagtatgagagtcagcaagacctacagaaagcatctatctgcactgttttgcagggacttagcctttgtgtgtggactcctggaatgccacccactaagaaacattgtctgacaccaactccccacttggtaggtggggacactgaaactcatggcaggaaagggccttgccccaagccagggcagagtgtcactcatcactctcaattttcagtccagggcaccttgttgtgactatcccaaaggcagccactttccctggtctgaaagacctgaagagagaagagaagagaaggatggaaggcagagtatgcggctttgattcatttcctggtgaaaacagatctatacgagaagcaaatttcacgaaagggaagagaagaaagtgtcccatacgttgctggcctgtttcaaccttgctttgattcttgctgaaaagggtaccgtgtatttctgagttcaacatgcagaccagtgttaggaaagccactgcacctccactttagcctccagggctgtgccctgcaaatggcctgcagccttggtgcctcgctctccagactgcattttggaagatgggacagaggcttatggaagcccacattagaacgggggagcagaatgggtgagatgagggatccttgatagtgaaccagatgaaggaatggtagccaaatgccaggcctcctttgtggcttcaatccaaaggctctggagcccttccagggcagaacatcaggcatgtttacccccactgtcctcaacagtgacagaggtgcaatcttgggcagctggccattttgaaagcaacctccttaatctcaactgggaaggctccctagcaggacccctgtgttgcacacctggaggaagctagactaaccagaagctcagcacggttccatctgggatgcccaggtctgagacgaaaaaggtaactctcttttctgggtcctggcccagttgtgtctctctccacctcattctctgagatgcctgtctccccttttttgtcccatcaggaggcaagagctatcactgggccagactccaccagaagccaagccagcttgttacccagcttctcagggagcaaagaacagccttgtttctatcttatccccactgtcccctgcccctgccccacctcccagccattcagcttctggcttccccagagctgcctgcttctttgtggtcctccattccttgaaaagaccttctagtcattagtgtatataaatggccacttagcccagattacagtgaggtcaacagctggggctctgagaattgtcacacactggcacaggagaggaggctattcttccagagaatttggagggcactcccatccacttacaacaaaaagcccatccactgtgcttggcagtaggtgatctgagaaccaatggaaccaggttaatcctgtggcactgttgagtgaggagagcagtggcgggcactggaaaatatcagagacaaggcaggagacctgaaatctaggcttagctcctcatatacttggcagctgtatgacctcagacaaccagtgttacctctctaagcctcagtttcctcatgcaaaaggagggggaataacaacagagcccactgcttgggggtgttgtgaggacaggatgaaaaaacaaacagaaatccctcagtacaggattcagtgcagtggacagtcttgcaaggtctggttcagccctccacccctaccctcaccagtataaagaactctggcctacaagtcagatgacctgagttttaatctcagctttgccattagccgtgtgaacttgagaaagtccctttcctttttacatctattgggatgatcatgcattttttgtcctttattctgttaatatagtgtgttacattgattgcttttcatagactgaaccagccttgtattccagggataaatctcacttggtcatggtgtataatcctttatacaaatgttgctgggttgagtttgctagtattttgttgaagatttttatgtcttgattcataaggaatattggtgtaccttccccttttatggccacagtttccctacaatgatgtagtcgaactagacaacctccaatatctttcagtattcatgtcctctgattctgtgaaactaagaaaattaagaaatagtgattcataggcacaaggcaggcaaaacttagactccttgtagaataattaggaagccaaatattcagtgtgcttatttctcaaataaccttagtttctccagtctgccccaactccgaggcctgaatatctctagatgcttatgatggcaactaaagcctaaaagctaattcattttaaagttcttccaaatgcatagggttttatttttccagacctgggttcagatggggaatttgacaaacaatggaaagggggaaaaacaacaatctaaacactgagtgacaaagtaacaaagaaatagtctagctatcagccagtcaagccagccttggctttgctatccaaagtagtcagtctaattctaccaccagtttctgttcctgtagctgtctactgcctgccagggactctgccttcccacccacaactaccaatggaaggatgtggtgaccataccagtggctgctgacatctcctgccatgggaagcataattgcctccagcagcctcccccttagatccatcatttttgttgcacttggcctgggctgtactcccggccaatgactgaacatggtgagcatagtaatgcaggcccatttctgtgaggagcaggactcctccagtaggtgactttggctcaaggactctctattggcctggttgaacttttcctgaactgtgctactgtctgagactcttcttacccaatcctctttctcgccccaattgtcacagaccacctgcattgtggtctgagtctctccccaccttctcttgctcttccctgtttatctttcacaggcatttcccccagtacattccttgaatgtctaacccgatacgggtgcctgacttttggcagacctaagcagacaaaaaggagtacttggttacctagctcttctttctaccacaaacatcgagggaaccctttttccctcacccctctgccacacccccactgccccagtgaacaaccacagagagagctgtggtataatattaggctggtgcaaaagtaattgcggtttttgccattacttttaatggtaaaaaccgcaattacttttgcacctacctagtatttgtgtccccccaaattcatatgttgaaacctaacccacaatatgatgtcattaggaggcaagaccttgaggaggtgattagatgatggggtggagctctcctgaatgagattagtgcccttataagaagaagcccaaggaagctaccttgactcttccatcacatgagaatgcagcaagaaggcaccatctactaatcaggaagagagctctcaccagacactgaatctgccagtgtcttgatcttgaagttcccagcctccagaactatgcataatgcatttccattgtctctaagccacccagcctatggtattttgtcatagcagcctgaactgactaagacagtgagccacatgagaagtgccccaacccctcccttaagcacttggctcacagatcagtgggttcatttctgcctgagttttattgttattctgtagatttcttgggctagatatatttttctgttattttccttcttcacctcagtcatgaattggttgttttaaaaaagacaatgtaagtcatggggaaactcctgacaactctactctcctagggttcctgataaaaggggattcagttgagtcctctgatggtctctacctgccaaagtccagcagcccttagcaaacatgctgctcgtttctgtagagaaggtgctggtgtcccaccatacttctctctccctcatgaagggcttgcgacccagcaaatgggtggcttatatgggtctgtttcaaaggaagagccagctctgggaagaaaaacgatgagcataagcataacctaccactgtgcctgggaaagcagacaacttttttgatgtgtgaatatctaatgagaatggaatccatcaattaccttaaacttaggcacagtcttcaaattcaatatatgtgggatatacttttagtcagtttgtagacgttatttgtaataaataatctggcttctctaaagaaattattttaagtgtttggtttggtttgatttaatggtaaaattatatttagtggcagagaattatagcaatggtgataaactatagagtgtcataagttcatatcttattctcacatttgaagctgcctgcagatgcattcaagatgcagccagaagtcaggagactcaggctgttatttggagctcatcattttacagccttgctggactcccactttctcaggggaaaaatgtggtgttgacccagattagctctccaggccctgctgagttgggcactctgtaagctggagggtcttctattgtcttcacctaagtgtcaatcaacaacccaaatgggcatgggggaagagggagctgggccaatgcccagggtgcctggtagagagataccttgggcactggaaggcaccagcttcccagagagaagggggagggccatgaaaaagttggctgtagatgccagggacactgggactctccagctgtgtgtttgtgtcttctgaagacttatgtttcattcctttggagcatgcataatcatacactgtgggatgtgttatatagattgcttgatagttcaccactgtaataaaatactgtgactggaatctgctcccagtctgcctttgatagcacttgtgcaacacacatttactgagcatttacagtgatccaggacctgtgttgtgaaaacattgatggacaaggcagatggtggagcacgtcagtgaggatttttaacaaaggctggtaagtgctataaaggaacattgtaggacactagagaacaaagaacaggagaacctgacttaggctggggtggggcgttggttagaggaggctccttggaggacatgaggtttaagctgtgacctgaggatgaatagatgttggccaggtgaggtaccggtatttgtcagccttaccagtaaaaaagaaaacctattaaaaaaaaaatacacatacaaagcctcatcagccatggcttaccagagaaagtacagcgggcacacaaaccacaagctctaaagtcactctccaacctctccacaatatatatacacaagccctaaactgacgtaatgggactaaagtgtaaaaaatcccgccaaacccaacacacaccccgaaactgcgtcaccagggaaaagtacagtttcacttccgcaatcccaacaagcgtcacttcctctttctcacggtacgtcacatcccattaacttacaacgtcattttcccacggccgcgccgccccttttaaccgttaaccccacagccaatcaccacacggcccacactttttaaaatcacctcatttacatattggcaccattccatctataaggtatattattgatgatg

SEQ ID NO: 289 - DNA, 30158 bp, Artificial Sequence
  HDAd35-T4-Ef1a-SB100-Flpe
  misc_feature (1)..(481): Ad35 5'end
  misc_feature (14103)..(14614): pgk
  misc_feature (14763)..(15785): SB100
  misc_feature (15811)..(16128): BGH pA
  misc_feature (16088)..(16376): beta globin pA (Complementary)
  misc_feature (16488)..(17759): Flpe (Complementary)
  misc_feature (17780)..(18895): EF1a (Complementary)
  misc_feature (29751)..(30158): Ad35 3'end
catcatcaataatataccttatagatggaatggtgccaatatgtaaatgaggtgattttaaaaagtgtgggccgtgtggtgattggctgtggggttaacggttaaaaggggcggcgcggccgtgggaaaatgacgttttatgggggtggagtttttttgcaagttgtcgcgggaaatgttacgcataaaaaggcttcttttctcacggaactacttagttttcccacggtatttaacaggaaatgaggtagttttgaccggatgcaagtgaaaattgctgattttcgcgcgaaaactgaatgaggaagtgtttttctgaataatgtggtatttatggcagggtggagtatttgttcagggccaggtagactttgacccattacgtggaggtttcgattaccgtgttttttacctgaatttccgcgtaccgtgtcaaagtcttctgtttttacgtaggtgtcagctgatcgctagggtatttaccggtattcaaggattacatgagcttagaaatgtaattagcatagtgtgtggcatagtgtagataccaaataaatatgatctctccttctactcttgaaaatgcaaacacattcttggtggtcctaaaatagcctgtaacatggtttactcagcagcatttgctattcaaggcagatctgcctttagtcattggctgcgctcctgaacagctgtgtgaaaggctaacttttgtaaaccaaatcaaaataaaatgcagcaaaaatttgtcactgaaaggaaatcctcagtatatccttttatgaaatgaaagatccctcatccaaacttaacttttttaaaagtgcgcatttggagatatagccctttcttatgaatcctaattcaattttggccataaacacacgttgatgttccccaccccaaagcacatagcaacaagagtaggttctatattgaaaataatgacaatttaaaaacatgtacttatttcactgtatgtggacagtgtctatgattgcatcatgaagtgtcatataaccatgtacgtgtacatgagagagagatagagagagaagtggtagggtggtggtggtagaggggatggcgatagtaatcatggtaatggtagaggtgatggaggtggtaatgacggaggtaagggtggtagtgatgatggtggtggtggtaatggtggtggatgtggtggtggcaattgggatggtgggatggtggtagccatggtgatggtggtaatggtgttgatttaaagggtggtggtagtgaaggtgagggtagtggtggtggaggtggtggtgctggtagcaatagtgatggtggtgatggtgttgatgagggtgttgggatcagggtgagttcccacagtatatttcattcttgttgtaccactctgtcaacagcaccactgactgggacagaggaagaaggcacactctgaatgtgttattaacagaaacctcaaaacagtctgtctccttgtagtcattcaaaattatctttttcttacctggaaaactgaaactgaattaccgggaaaaacacaggagatttttgtttgttaatatgctgccaataaagtaattttatgtcaaatttaactacaggaaagggcaaggcattttctaagttccttagatgtcatgtggctaaaaaaaacaaaaggatggacagcagttagatactgtacacttagctgtttgaagccatatattcagaaagcagatgttgggagttggtgtttgaggactgatttcctggaggtattttatataggccaagttcattgttctaaactctaagggcttgacttgagggaggaaaagaggcaagaacatgtttagttttgctgacagcatcacatgggcagccctaaggctagacaactttagggcctgaagcttattctaggaaagaagcacctacagagtggcactgggctcccctccactatagagatgaagtcatatgacagtaaagggcaggcagggctgcctagggggcccagaactgacacttccattagaatgagcacaggccagggagagaagtggggaaccagagagaaggagctggaattctagtaggacaaacggtaagtgaacaacaagaacaagttaagagtgtgtgcagtattctttcaaagactgaaaaaatagtgatgtgatagaatggcaggtggctctgagcaggccaggagaaggactgggggcagagcatcccaggcaggagggcagcaagtgggaaggccctggggtggggcttttggactgttccagtgacgggcaggcagccagtgtgcctgtcacacaatgcaccagggaagtagtcgtgaatttgcagagggtcttgcaggctatgggaaagggattggattgtattttgtttgtagggaagccatcgggggacttaagcagaggaaggattggcttcatctctttgaaaaagttctctctggatgctgatgggaggagaaatggaaggaaaagaaacacttttaggggcaagaacttttgagaagggtggaattgggagtgtggagttggggccagctttggcacaggaggggaagctaaacacgtggccgcatgagggcctgtaattctacctgaaatgggtaccatttgttagggtaaacaaatgaaccaaatgcccagtgatacagaccaagtgttggcaaacttcttctgtgatggcccaggtagtaaatgtctcaggcttcgcaggccatgtggtctctgttgaagctctgtgtagtagacaatatgttaatgactgggcgtgactgtgtgctaataaaagtttatttacaaaaacagcccgtgggctggatttagctcacaggctgtagtttgccaacctctgacctagagcatgaactgagcatcttcttggagggaaataagttctttccaagttgccctcctcacattgcagggggccatgtaggcccattattcacagaagagtgggtgggcaacctttctggagcagaaaaacgtaaagatttcttccgtagtgcaagtaaggtgaccatttctaaaccgtgcaagtgatccagcagtcccaaaagttgtttcacttctcattgtgcgcccgttctcaggtgctccgaagcttccagtcctttgtagggacatggatgaaattggaaatcatcattctcagtaaactatcgcaagaacaaaaaaccaaacaccgcatattctcactcataggtgggaattgaacaatgagatcacatggacacgggaaggggaacatcacattctggggactgttgtggggtggggggaggggggagggatagcattgggagatatacctaatgctagatgacaagttagtgggtgcagcgcaccagtgtggcacatgtatacatatgtaactaacctgcacaatgtgcacatgtaccctaaaacttaaagtataataataaaagaaaaaaaaaaagagaggagagaaacatcatcccctccaggatacccttgggccttgttcttatagtcttgtacattgttgaacaatttgcatgggctagtggattaaagcacaccctccaccctcaggccctcaagggtctctatgataatacagtctcaccttctaccctttccatcaccatcctaggtgctatggccaaccttgaggctgccatgttaggtctatgcatttcccacctccaccacataactctctgaaggccaggtagtttcctattcatcttggtaaccccaaagcctcgtgacagggctcagctggcatctgcggatgtgaatgaaccattggagaaaatggtactctgcaaataactctgttattttcccatttcctgtgtaaggcctagagacaatgactttttaattgcaccccttcccctctgtatgacactggccttctcttgtgtccagcaatgtgggtggcctagatgatttctaagggacttctggccaagatgaacagcagctgcatcttactgagcatttactatgtgccatatactcagccacagctctaggggcatagaagcaggagctctcagggtcagggcagtgagtgagcaagcgagcacctatgccagccctgcctctggatggggacttgagagggtgatggaagcctgcagcactggagggaggcagacaaagacaggcctgtgctgagggggcccggagcaagagagagggaggcaatgacagcagagacatgcctgcgccttgggtttgagtgcccagtggtcaaatccacttccctgtggctgatgcttgcctttctaactttggaatttaggggttggagatctggtgagaaggtaggagggagatgaggaggagaagggaaaggcaggaaggaaggggagggaaaggaaaagcaaaaggggaggaggaaggtttccaacaaattattctatatcaactgcggaaatcaaaatttgttgcccaaatcttagaagctcatgtccctcctccccagaagtctggaatgcagcactccaggggtagcttataacccaaatatctatctgtaaaaagagaaacattgggctttcgagctgtggattctcagtaaaagcaagaggcctcagcctacacaggccagcccagagtttgaggaaccccaggcccacacccacagggctggcccctgggtctgcatactccctagaaatgtgcacacttctgagcctcaactctgtcctggagtctaacagcatccctctccttcctggggcagttccacctccagaaacctgttaccttgggccttatgtcaaggaaactgtgggaaagagctaggcaggaatgcagatgaggccagcatgggctcctaaaagtttagaaataggcagtgtcatgctcccaggtgcctgcataaaccagctgaaaaatggagctcccctcaccagcactctcccttcaaacagactgtgatttgcaggtcactggtttaccaagccaggctacccaggcaggacccagatgccaagcccagtggtgtcctgcaagctgagcagtgctcagttcttgcaaaaaaaggtctgtgtgaaggcaaggcctctgcctggcttctcaccccagttgggtgtctggaacaggaaggagcccttactgcagaaaaaggaggagggagcaaagggagcgaacagctgcgtgctccatggggaggatccccaaagtagaaaggcgcatacacactgcagcccttgacccagaatgctcacagctacattacagattcaggtctcctcagtgtagtggggctgctgatgagactgtggcatcctcaggggtcaggacacacattttccatcactcttctgatggcaaaaaacctctgagccaatgccaacctctgatcattaaaaaaaagtgctcacagcagtgtgtggtttaggatcatgccctgtgtggtttggaacacgtgcacaaccacaccttgttcatcaccatcccagaaaccctgacgcaggcaaagagcagagttattaaccctactttactgatgtggatactgaggcccagaggctcatgcaagttatcaataagtggcagggacagttgcctctagattaactagcccctaggatcacctgggtcttggaaggggacccataaacatgagctcccctctcttggggccagatttgcacctgtgccgcgccttcagcctgcatgaagtaggggctgctggcaaagactcaaagctgtaaatctgggttttctcttgaggcttctaagggagctgtttcgacaactcactctgttcccagctggctgcccctgcatagggttttaaagcagcctagctttctgccaggcttggcagtggacaacgctggtcagaacatcccagagagctaccagaatgaagtaagtttgcttctactctttacctgtttatgggctgtctctgccactggaatgaaaggcactgagaacagtgcctggcctgcagaaggccctggaaatacctgagctcctaatctgggaataggagtaggaagagctttggaggcagggcacctgagtttgagatctacaacttcctgcctgtgtgacattgggaaagtctccatcctttctgagcctcagtctccaccctggggaagtggaaatatcaatctctgtgacacagaagcaaatgagcgaatgtgcacaaagtaccttgcacaagagagacgctcaaacacttgcctccaggtttcaccgagaactacagagtaagatagatttgttcccagtggaggaagcctgggaataatttgcccctagactatgaattcctggggctcaagatcgagcacagggccaggcacacagaagggaccctggaaatgtggcaggaggccagagatagacaggcccttagagctcatacccatgccctctgacctcaagaagaaagaaacctgctcaaaatctcacaaagagcttgttccaaccctgaatcgagtctgaggactccttcctgagtccagcactttttctgcaagaagtatatgcctccaaagctgatgggcgcaaatcttgaaccccgtcacataaacacaaagggaggaggtgactagagctcctcctactggatatgtctaaggtcaccagtctaaagaaaagggatggatagaatgaggccagtatttttgcagccatccaaatgtccacatacgctgttacactgagggctcctctctcccccgtcttcagccctacttgcatttagaggtgagaaagatatgggctgaggggttgtttttcatcgtattgtagatggaaagcacactgcccttggggccatccaaatgtggaccttgatgtagcaccccaccttctggatggccatccttctgaaagtcactgaatttctcagactttattctctttatccataaagaaggagaataataataatccccccaccctgcccaaccactgactggttgggaagctcagaagaaatactgggcacggcatcccattgtaatctatagagtgagtcgcttcttaatattaaatggctgaacacagaagatgtgcaaaaagtactgtgtccccttcctcctccaactgaacatttcatgccctttgcaccctcattttgtctaggagctgccttatgaagggaataggtacctgctccgagctggaggaatctttgccacttatggtggggtatggactgagacagagatggcatgtgacatgcgcactgagtctcaactccatgcaggctctggagcactctcaaattggagtactaatgccttttaaattctcacactagcaatcctttgacctactgatctagggatctagggaaagaatcgtgatcttaacttcaaagggaaggacaaaatgttctgcctcctgttaaaactccatacactaagtgcagagactggatgccttattaaccttgggtagatgcccaaatgttcaaaaggtcaaactcttctgttccccagatcgccagagtcattaaccagtcacactattaaatgaatgaacagatgctgaaaaggtacttgcattactgagatttcttatggtgatggcccctgcctgatatgtattcagcattttgtagttttcaatgtgcattagagtatagtggtgatgacattggcctctgagtttgccacttcttatatctgtgactttggtcaaattgcttaatctctctgagtctcggtttcctggagataataatagcttcttcttcccagggttatcatgaggattacaggagataatgccccaaaaatgcttagtaaagtgcctagcacctagtcaatgctgaattaaaggtggttattcttacttttcgttcatttgaactttgttctcagggagggcaaaggatagacaaagccccatagctagtgaggagtagctgcaagactagaacccaggtgttctgagccctagtcttaggccaagaacaactgttacgtgagatgcacgttttccttcaagggagctcacaattatttccatgtaaattcaaggactgctaaaagagaactctcctctgggactgatatcattttatttcaagattgatttgaaacatgttttttgtttgtttgtttgttttctaggaaagaacaagagaaccagttaagctgaatgcctgaagcaaatccctgttagcgatgttttcaggatgagggagagtggtgcaagaaacgtgcttccagatgcacatggtttcctgggactagggttcagggtgtcatccctgggtgttattaagtgtcagaaggagagcaaacaagggaaacatctgagatccagctaaggctacaccctggaaatgcaagcccagctcttgcaaaggacctcctttggccactcaccttccaggccttacaataacttgtttggactgcaggtttcttggtggactcacaggccattctgcttttatttggtcaacctcagttcacaagcacccagatgctgagatcctcagcatgtgcagcagagtttcatattagcactgggtacctttctgaggctacagggataccgtacagcagcacctgtcacgtccagccaaaggagtgggctctctcaatgtcatccaatgctgtttcaactgtgaagaagaccatctgagagagttgcttttggaggctgaggcaaatttttaaaattctttgttctcctcaactggggtgaattcttggtcttctaggacagcttgaagttttagaaagagtcaagccactcagaaccaacagagaactctttcagagaacaaggtgtggcatagaggaggcagagggctgatcttgatcaaatccaaagtgtgactctaaagcaatgaatgtgaatttttggcaaagcttacaaagggctctaaaggccatctgcaaagagaagccaagcctgatcgatgaatcactagtgcggccggatatcgatcggcacgctgttgattttctcatagtaaggaacagtgggccctttcagtcccacttctgtagtctgtggtactacaaatggtgagcccatgatgttgccattcatagggttattctccagcagtaatgactggccagccactcccatagccgcggggctaggatttattgtcaatggagggacctgcagttctgcacaagcagtactaggatgagcacctgggcccattgcaagggtgacatcttcaaggcaaggcctcttaattttattagggtagcccccatcagccatgtctggaaactggaagtggtcttcttcttgtctcctcttaacagttccctgtgaatggaagagaagagaggaggagaagagaggagaggagaagggaagagaggtgacacacacacacacacacacacacacacacacagagagagagagagagagacagagagaaagagagagagagagagagaggaatttttataaaggtttggcacattaaagctaatgaacaggaaatgtgcatgataaaacagacctctcagtttaaagacttatagttgtgaaaactataaaatacagcctgtctttggaaccatagtgcttatttattcattattatgtttcatctaaactgtctaattacatttcaaataaggcattatgttgtctgtatactaaaacgggatagaacgttattcaaagggtaatctgcccacttcaaggagagttcaacaaaactatgcagaagtcactaaatgaaccatgctgccaaaggcaggcattggagagaaaactagaagtagctaaatagttttaattctttcctgtctacagacacatagattttaacgaaggaataccatagtatagaattgaacttttaggctgccttctagtcttggttaaatgcatcaggctgcagtggtaaaattgaatacaacagagcccttacaggaaagaagtagatctggatgtgttttcttggggagctgtttaaaatactgtttttgggaaagcacaagtttcagaacagtcattgtaggcatcgtattcattgttccatttatttttacacacacacacacacacacacacacacacactctcacacattgctatgtgtacacaaaaataatttggaagaacctatacccaacaatttggagtggtcatttatttgggatgactggcaattccctttctattctcttcatttctgcttgtttgtctttaacgagaacgactcataatccaaaaatttaaaaaagtataaagttatctaaataagaaattttcctctgaagatgcatcctcaggttggggagatattaaacaatgagaaaaggccccaatctgggatctgaaccttgggggagctgcccatcatttatagaagcacagcctttgggaacaaagcaaagtcactagcaatgtgagacttcctactcttcatggcttcatacagtcatccatcgctgttgtgttaatgaccatgacctgtatgttagcaggtaaatgggaaaggaagtgggggcaaaggagtatgtgcaggaatgatcaaaataaggaaaggaagagagggatctggaaatcacctgaatgccgataggtgaacaggtagaattcttttaaagcttcccccacccggtaccccccaaataacccctttccagctttggaagtttcactaggacatacagtgctcatcctctgatgtcaccttaagtttggctcttctggtttgatgagcttgtagcccactaggagctcaaggcatgcatggggccacttgccagcacgatgaggggcatgactgtcatggccaagtgaacatcaaagcagatccccagggctgtatgtctcaggccttggtgcacatcagaatcacttagaaacatccacattcctgggccctcccaccacaaactgacagcttcatccagggtgtggcccaggcatcgggagtttttccaacagctccatggctgattctcaacagaaaaccactggcccagagcaagggtggaggcagcgtggcatagggctctgaccttggccttgccactgaacctctcagagccccagtttctttatgtgtaaaatgagtgtaattatagttcttttctcatgaaggtgctctgactattaagtgaaacggggcacattgtatgacacctaatagctcctcactaactggtacccggcattataaagggcaggtatggaagggttctgggagtccaatacccttcttaaagacagagaggtctctgagacccagagaggggcaggccttacccagagttgctcagccagagggcaacaaggcccaggtcagatgcagggcccctccaccaccactcagctgcctccagacccactgccttcgccatgttgttggtaggacactgcatcgcccccacagaaggggcttgccaacttgagtgagaggacttgcacacttctttgacttttcttttgagatgcccacaatctgaacaagggcacttcaagggacagctctgtcaccaaactcatctgaggcctgaataccatgggtcaggcaggaatgggttggagaggtgtagagcaggcacaataagagggctgaggcccatgcagtcatcagtgcccactttcccaggagtctgactgggcacagcacccatagtgtccctgagctggtccatggagcagctcactaactgtttggcccacagcaggtgctcagtaaatggcagttgaacgaatcaatggacaaaggaacataaattacccaacacacagggagctcagccatttactcaatccattatggagtaacctacaaacaagccactgggtcccaaactgaaattgtgtctcttctacattctcccaaagaatccaataggttaaaaatagaaatgtatgaaatagatcaatcagggatgattgcatgtggatttgacataaggatcccctgcagggagtctgagctggcaacagtcaggcccaaagtgctgtccatgatgtctcgaactgcaagacagttttaacaatggcgaagcaatgcagaaccaggcaggccaaggagggggtgggggttggggaaaggaagggagggaaggggctgtgaggggcaatggtctggcatccctgccacgtgagcctctgaaatttgctggcagcttctatgggctcccagagctttcacttaattgttggtctgccactaacctgctgggagtaaggtgcagggatggaggaggcagggcatgaccaccagacactaaaggtaccagctggggccactggcaaagggaaggaggctgcacctctcctacatgagagcccgtatacacacaccttttccagcactcatcaactgcatcccaagcaaatggtccctgatcaattccaattctagaaaccaactgactactcaataacaaagtagatcccagcaggccgccactgctggagcggatgccacttttgctatgccaagtctgtggctggacagctgctggcatgtacactcactgactttcataaggatgcctaataaagggggcaggctcacctggcttttctcaggggtggggtttggggtgccgatagaggctgctgttttggcagagtggcaagctgcaagcctcttctgagctttcatttttcaatggacttcagtgagaattcactttgtcagaggccatgcagctccatgttttggatttcatggaatgagctttcaacagtgagcctgaagtgccctggctgaacagcaagaacaccagccaaccctaaacaaggccgaggagaggcggctgtgtttacacggaaggctcagccttgctgtaatagcgtctgccttcaccagacatcagtgaggcgtggaaatctattatccagttaattttgcccctagataaagacttgctttcgtgtcttctctttcacagtcccatgatctgttactcatctcaactgcgagaagttggctgggctttcccctgtgcccagtgccacactcgtgccttcactgggtcacctgtgcctgtggctgatgccgctgaggttttgcctgcccagactgggtgtttctgactaaatcccacagccaccattttagatcaagggcaggagatagctcactgctccggaatgacctcccctcccagaatcctggtaggggcggaaggtccccaaccaagctcccagccctttctaaatgaatctccctgcttcacccatgtgcttttctccagtctctgcggtcttgatgacagcagggtattagtcctagctgtcccacagctcctacttctttcaggcctctccctgtgacaatcagtagccactggcaggatttcctcagagcatatctcgatttgctttcagacaattagttaaaaggacactggaccccagacgtcccaactcccagccagagccctcacaggcccggcctttggtggtgaggaagggggagggagtgagtgacagtgccctggcatcttttagaaacgaattcctttctctccatacataaatgcctgcagagtcccatttcagaatccggcagacaaagccaccaatgtgatccccatgaccttataaacattcattaaaatgcatttcaaggcatgtgatggcctccccaccccctagataatgagaaaacaaaggtttctcttctgatagagacaagttcagctctgaagtcaacattatttctggttctgtctgaacaatgacatatggcaactcttccctttctatagttctagtccagaatgacaaaaaaggggaaaaatttcttagagaaggtagagattatacgaatacagtccatgaaatgagcataaggagaataaagaatataacttatccaaagaagtctggcaggctgttataaatgcttgattttggacactgtagttggaggtttaacatggacaccaataaaaaggtcagcaaagggtatgcactgttcctattgggcaagaagataggaggtcaaaggtaaccaggaaagataaactcagggagacttattttccctccagagggcactgggcttgtaggccctgggcaaaattgtcaaaaaggtgaaaatcgcctgtggtttatttagtctgctctttcttcactagtgcctcaccagttcagttcaggccaatttgctaggaattctaccgggtaggggaggcgctttcccaaggcagtctggagcatgcgctttagcagccccgctgggcacttggcgctacacaagtggcctctggcctcgcacacattccacatccaccggtaggcgccaaccggctccgttctttggtggccccttcgcgccaccttctactcctcccctagtcaggaagttcccccccgccccgcagctcgcgtcgtgcaggacgtgacaaatggaagtagcacgtctcactagtctcgtgcagatggacagcaccgctgagcaatggaagcgggtaggcctttggggcagcggccaatagcagctttgctccttcgctttctgggctcagaggctgggaaggggtgggtccgggggcgggctcaggggcgggctcaggggcggggcgggcgcccgaaggtcctccggaggcccggcattctgcacgcttcaaaagcgcacgtctgccgcgctgttctcctcttcctcatctccgggcctttcgaccgttgatccggtggtggtgcaaatcaaagaactgctcctcagtggatgttgcctttacttctaggcctgtacggaagtgttacttctgctctaaaagctgcggaattgtacccgcggaattaatacgactcactatagggactagtaccatgggaaaatcaaaagaaatcagccaagacctcagaaaaagaattgtagacctccacaagtctggttcatccttgggagcaatttccaaacgcctggcggtaccacgttcatctgtacaaacaatagtacgcaagtataaacaccatgggaccacgcagccgtcataccgctcaggaaggagacgcgttctgtctcctagagatgaacgtactttggtgcgaaaagtgcaaatcaatcccagaacaacagcaaaggaccttgtgaagatgctggaggaaacaggtacaaaagtatctatatccacagtaaaacgagtcctatatcgacataacctgaaaggccactcagcaaggaagaagccactgctccaaaaccgacataagaaagccagactacggtttgcaactgcacatggggacaaagatcgtactttttggagaaatgtcctctggtctgatgaaacaaaaatagaactgtttggccataatgaccatcgttatgtttggaggaagaagggggaggcttgcaagccgaagaacaccatcccaaccgtgaagcacgggggtggcagcatcatgttgtgggggtgctttgctgcaggagggactggtgcacttcacaaaatagatggcatcatggacgcggtgcagtatgtggatatattgaagcaacatctcaagacatcagtcaggaagttaaagcttggtcgcaaatgggtcttccaacacgacaatgaccccaagcatacttccaaagttgtggcaaaatggcttaaggacaacaaagtcaaggtattggagtggccatcacaaagccctgacctcaatcctatagaaaatttgtgggcagaactgaaaaagcgtgtgcgagcaaggaggcctacaaacctgactcagttacaccagctctgtcaggaggaatgggccaaaattcacccaaattattgtgggaagcttgtggaaggctacccgaaacgtttgacccaagttaaacaatttaaaggcaatgctaccaaatactaggggccctaaccgcggggatcaacgcctagagctcgctgatcagcctcgactgtgccttctagttgccagccatctgttgtttgcccctcccccgtgccttccttgaccctggaaggtgccactcccactgtcctttcctaataaaatgaggaaattgcatcgcattgtctgagtaggtgtcattctattctggggggtggggtggggcaggacagcaagggggaggattgggaagacaatagcaggcatgctggggatgcggtgggctctatggcttctgaggcggaaagaaccagctgggggttacctactttctttatgttttaaatgcactgacctcccacattccctttttagtaaaatattcagaaataatttaaatacatcattgcaatgaaaataaatgttttttattaggcagaatccagatgctcaaggcccttcataatatcccccagtttagtagttggacttagggaacaaaggaacctttaatagaaattggacagcaagaaagcgagattagatccctattatttttgacaccagacaagttggtaatggtagcgaccggcgctcagttggaattcgctagccgcacatacagctcactgttcacgtcgcacctatatctgcgtgttgcctgtatatatatatacatgagaagaacggcatagtgcgtgtttatgcttaaatgcgtacttatatgcgtctatttatgtaggatgaaaggtagtctagtacctcctgtgatattatcccattccatgcggggtatcgtatgcttccttcagcactaccctttagctgttctatatgctgccactcctcaattggattagtctcatccttcaatgctatcatttcctttgatattggatcatatgcatagtaccgagaaactagtgcgaagtagtgatcaggtattgctgttatctgatgagtatacgttgtcctggccacggcagaagcacgcttatcgctccaatttcccacaacattagtcaactccgttaggcccttcattgacagaaatgaggtcatcaaatgtcttccaatgtgagattttgggccattctttatagcaaagattggataaggcgcatttttcttcaaagccttgttgtacgatctgactaagttatcttttaataattggtattcctgtttgttgcttgaagaattgccggtcctatttactcgttttaggactggttcagaattcctcaaaaattcatccaaatatacaagtggatcgatcctaccccttgcgctaaagaagtatatgtgcctactaacgcttgtctttgtctctgtcactaaacactggattattactcccagatacttattttggactaatttaaatgatttcggatcaacgttcttaatatcgctgaatcttccacaattgatgaaagtagctaggaagaggaattggtataaagtttttgtttttgtaaatctcgaggtatactcaaacgaatttagtattttctcagtgatctcccagatgctttcaccctcacttagaagtgctttaagcatttttttactgtggctatttcccttatctgcttcttccgatgattcgaactgtaattgcaaactacttacaatatcagtgatatcagattgatgtttttgtccattgtaaggaataattgtaaattcccaagcaggaattaatttctttaatgaggcttccagaattgttgctttttgcgtcttgtatttaaactggagtgatttgttgacaatatcgaaactcagcgaattgcttatgatagtattatagctcatgaatgtggctctcttgattgctgttccgttatgagtaatcatccaacataaataggttagttcagcagcacatgatgctattttttcccctgaaggtctttcaaacctttccacaaactgacgaaccaggaccttaggtggtgttttacataatatatcaaattgtggcatggtggaagcttggcatgggaattcctcacgacacctgaaatggaagaaaaaaactttgaaccactgtctgaggcttgagaatgaaccaagatccaaactcaaaaagggcaaattccaaggagaattacatcaagtgccaagctggcctaacttcagtctccacccactcagtgtggggaaactccatcgcataaaacccctccccccaacctaaagacgacgtactccaaaagctcgagaactaatcgaggtgcctggacggcgcccggtactccgtggagtcacatgaagcgacggctgaggacggaaaggcccttttcctttgtgtgggtgactcacccgcccgctctcccgagcgccgcgtcctccattttgagctccctgcagcagggccgggaagcggccatctttccgctcacgcaactggtgccgaccgggccagccttgccgcccagggcggggcgatacacggcggcgcgaggccaggcaccagagcaggccggccagcttgagactacccccgtccgattctcggtggccgcgctcgcaggccccgcctcgccgaacatgtgcgctgggacgcacgggccccgtcgccgcccgcggccccaaaaaccgaaataccagtgtgcagatcttggcccgcatttacaagactatcttgccagaaaaaaagcgtcgcagcaggtcatcaaaaattttaaatggctagagacttatcgaaagcagcgagacaggcgcgaaggtgccaccagattcgcacgcggcggccccagcgcccaggccaggcctcaactcaagcacgaggcgaaggggctccttaagcgcaaggcctcgaactctcccacccacttccaacccgaagctcgggatcaagaatcacgtactgcagccaggggcgtggaagtaattcaaggcacgcaagggccataacccgtaaagaggccaggcccgcgggaaccacacacggcacttacctgtgttctggcggcaaacccgttgcgaaaaagaacgttcacggcgactactgcacttatatacggttctcccccaccctcgggaaaaaggcggagccagtacacgacatcactttcccagtttaccccgcgccaccttctctaggcaccggttcaattctagtatcgataaataggggattacttgaacatagactgtgggatccggtgtggagtgcgggagactagcaaagtgaatcctgagagtagcaggtctgcacctgttggatcgagaaaggcggcctacaattctggtcaaatgagctgtgcttattgacatattctattagagagtactaccaggtcaccagtcaccagaaaggctgccagctctccaaccacctccagggaactatcctgaatggggccttaacaagtctaagagagggttggtttgggtcccaagccaatatttgctctgctttatgtcagtcatatggaacccaaaccaaccctctcctatgtgcctcaccagtcggtgcagggatcccaatttcaagtttggttttttatggtcaaagtccagcatagattaaatgaaggggtgtgatgatggtgttaaaagagaactccagaccagtttaactcttggacacacatcccatctcaccatggtgcttccaaccttccagagatgatgggctcctattttctgatgacaaagccctccacaggattgctgcctggccatcagggagtgcctctgtaactgaggctgagatcccactttcagtcctccagctgtggcccatccctgctccgcccaccgggtatggcctgtcctaggctcttaggtatggctgcattgtgaaatgatggctacagagctggcatctcctgtagtctggttcatctagtgcactacctcatagttaaaagaaatctgtttaagccactgagggtggctcctagtgccaactccaagaacaggaagcttcccttttttgggaggaggggcagatggtaacatggatcgtccaggtcaatgggagcagggcaaccacagtaagtactggacaacaacacaaaactccatgtgtggcttccatcgagtccctctccaattggtttggtcttctccgtcccatgcagcactttagcaaggggcctggctgaaggctatgaattgtgtggagcctcctcattgcagtctccaaccatctgatgctgggaaaatgtcaccaggatgcagccatgccgtgtggccaatgaaccgagaaaacaccccttttctagaatgctctaaagaggcagaataatccagaggtgaggaaggaaatactccaccagagacccaggcagttcctacaaaagccagactttccttcacctagggagtgacaagaccagtggaaaacactctcaagcagtaacccccaaatgctctgcaagccagtggcgtccagataccgcacaagcgagtgggctgtctaatcccatcatcatgatgtaaatatctctaggctgccctgggctgtgcctgaccctgtcttcagctttccacacctccacctacagcccatgcacagaaggaccacccaggaatgctgcaagtgtggcacctccagggccacccagggagaaggagggcagctatgctggtggctccaggcccatttggcgggtggtaccttcacaccacaaagcccaaactgaggccccagatttggctgatgagggcatattggacaggggtcacttatgctcttccccattgccacctggcctctggctacctggacttggctacctgtggatcctctcacaggtgccaccatcttggctgagtctccagatgcgaggtccctgaggcagtggcgggcttctcgctaatgctgatgggattaggaatgggataggtggggagggccctggactgggccctgatgagccaagtgggtttttagaggggctactggtacatttcagggacaggacatctggtagagctaagctggggcaataaggagccactgctaatctgagagctagaaacaatcagcttctgggtcattattaattagggtagtttgggctgtgtggaagtcacgtactatatggggtagccacagctctctctacagataatctctaagacttctgattgggactgtgtgaatgcagtagcaatatctcttcttactgccaggccctgccagtcctgcctccacgccctggctggccccccttatgatctgacccatgccaggctgccatagtatgttacttctgcattagcactccttgggacctgcctctccactgtccctcagactttaaagaactatacaaacccaaggggctcttcccaagagaattgatatgacttgaggtgattccatttctggaagtagtcactccattttctgcctcactctttcagtgcttcacagagcaggttcgaacgaaggagccatccaactaaccgtcatgttcgggcaaccgaagaagggagtggcaggatttcctttggagacttctggaattagacagcagtttaatgcaagcatctaaattctctccctcccagagtctcattaaaactacagtaagagtttgtgttttgttttgtttttaaagacaaaatcccaccaggatagagagaataggagaggagataacagcatcataatttatgaaactaaaatgcagatagaccaggattaactgactacacagcaccaaggaagctgaatcacaagacagcagaggagaaaactggaaaggatcgtggtctatacggcagaatcttcccaagcctcaggaggaggagctctagatgttcccagatctgggaggtaaagtggaatggggggacatggtcagcgtaatggggttgggctggaagcaggttaaggagcaggcagatctctgaatcccctctctgactctgtgtccccaggcatctgcctgtcccccaccctggaagaggtctggcttgaccctttgtctggtgaatttcctgctctgctttcctggtcctgctggccggatcagtggaggccactcacttcaccccacagggatgttctgtgttgccctacacctgggaactggaggtactggaggcaggctgtggtgagcttgaaagcaaaacacagagggcagtccaatctctttggccatatttcttctgcatatccaataccatgtccacaactctgctagtgtcctgatggtggtgggctctacacattcccgggaagctgaaggcagataatgaccaggacaggtcaacctctcttcttctgaaagccttcatctactaatggcctgggactcttcccttaaatgcttagattgtgtcttccactaaggttttttgctgttgctgttgtttgtttgtttgtttgtttgtttgtttgtttgttttgagacggaatctcactctgtcgcccaggctggagtgtagtggcacaatctcagctcaccacaaccttcacctcctaggttgaaggggttctcctgcctcagcctcctgtgtagctaggattacaggcacatgccaccatgcctggctaatttttgtatttttggtagagacaggatttcgccatgttggccaggctggtcttgaactcctgacctcaggtgatctgcctaccttggtctcccaaagtgctgggattacaggtgtgagccaccacacccggccaaggtttttgtttgtttgtttgtttgtttgtttgttttgtattgaggcagggtatcactctggtcacccaggctggagtgcagtagtgcaatcacggctcactgaaacctccacctccctggcgggctcaggtgatcctgccacctcagcttcccaggtagctgggactacaggcttgtaccaccactcccagctaatttttgcgtttttagtagagacagggtttccccatgttgcccaggttggtctcaaactctgggctcaagcgatctgcctgcctcagcctcccaaagtgctgggattacaggtgtaagccaccgtacccggccccgccactaaggttttgaaaatgaagcaattacaagtttaagtctattaataagtgatgaagccatgtagaaaagcagaataattatcttggatcaggaaggtcacatgaggatctacttgggggttgtcaatattctatttcttgacctgatcagtgttgacagcaggttttaattttttacttctttttgtttgtttgtttttgagacggagtcttgctctgtctcccaggctggagtgcagtggtatgatctcggctcactgcaacctccgcctcctgggttcaagctgttctcctgcctcagcctccccagtagctgggattacaggcaggcaccaccacgaccagctaatttttgtatttttagtagagactgggtttcaccatcttggccaggctggtctcgaacttctgatctcgtgatccgccctccttggcctcccaaagtgctgggattacaggcttgagccagcgtgcccggcccattttttacttccttattaaactgtacatataggccttgcacacttttctgcatcaatgttatattccacaataaagggaaaaggtatatacacaacttgataccagtaatgtgaaacatatatttctacatagaaaaaaaaatgactgaaatactgcactccaatgtgttcacacagtagttgtttctggattatttatatattaaatgtttatatattgtattatgccatgaggtttgtgttttctctccacttttctgcattttccaagtttactacaaagagcacatattactcttataatcagaaagtcataaaatatatttaaaaagacaaaattgaaactaataaggatcaacacaaaacagatgagccatctgtggaaatccgcacagaatactacctaaagagattggtgacgtgcatgatctcactaggatgagcacaaagcttgccagagcctagggtctatttctagggttggctcttggaagccaggatagttgttatctctgggaagagggaggggcacacaaggggcttctaaaacattctgaatgttctatttctgaacctggttggtgggtacatgactgttggttttattattatatgttttatatactcttccgtatgtatggtgtggattccaaaaaaagatttcctttagagaaaaccagaatcacataagtagaaaatatggtgctatgttgaaggaacaactcaagtttatataaaatcatcatcatttataggcttaaaaagttgctttggaattttggtctaactgacttgtcttttctgcagcaaaccacgctccttctggacgtgctccaggcagaggggattagggtgggttcaaggctgcaagtacctagctcagcacactctcttcaggggacttagagtttgtctggtgttggctctctgagctcttgtcaggaatgccgacccttccgaggttcaggatttgaagcctgccttcccaccccagatttggtccacacagacactcaagtatgtatttcaactacaaatgacctgtactttcctattactcctctctttcatggtaacctttctggtatccttccttccctacatttatgggagggggacatcattctctgctctcctgtcactgaaggctccaccttctgtcttcttctgacccatctggttttcctggggccacctcctctccttaccaccctaacgcttttgtaacttgaggagaaatgagagatcacctagtcaggtcatcattctctgtagatgaagaggcccaatggtttgctcaagaattgccaagcgagttaaagacagagagtatgagagtcagcaagacctacagaaagcatctatctgcactgttttgcagggacttagcctttgtgtgtggactcctggaatgccacccactaagaaacattgtctgacaccaactccccacttggtaggtggggacactgaaactcatggcaggaaagggccttgccccaagccagggcagagtgtcactcatcactctcaattttcagtccagggcaccttgttgtgactatcccaaaggcagccactttccctggtctgaaagacctgaagagagaagagaagagaaggatggaaggcagagtatgcggctttgattcatttcctggtgaaaacagatctatacgagaagcaaatttcacgaaagggaagagaagaaagtgtcccatacgttgctggcctgtttcaaccttgctttgattcttgctgaaaagggtaccgtgtatttctgagttcaacatgcagaccagtgttaggaaagccactgcacctccactttagcctccagggctgtgccctgcaaatggcctgcagccttggtgcctcgctctccagactgcattttggaagatgggacagaggcttatggaagcccacattagaacgggggagcagaatgggtgagatgagggatccttgatagtgaaccagatgaaggaatggtagccaaatgccaggcctcctttgtggcttcaatccaaaggctctggagcccttccagggcagaacatcaggcatgtttacccccactgtcctcaacagtgacagaggtgcaatcttgggcagctggccattttgaaagcaacctccttaatctcaactgggaaggctccctagcaggacccctgtgttgcacacctggaggaagctagactaaccagaagctcagcacggttccatctgggatgcccaggtctgagacgaaaaaggtaactctcttttctgggtcctggcccagttgtgtctctctccacctcattctctgagatgcctgtctccccttttttgtcccatcaggaggcaagagctatcactgggccagactccaccagaagccaagccagcttgttacccagcttctcagggagcaaagaacagccttgtttctatcttatccccactgtcccctgcccctgccccacctcccagccattcagcttctggcttccccagagctgcctgcttctttgtggtcctccattccttgaaaagaccttctagtcattagtgtatataaatggccacttagcccagattacagtgaggtcaacagctggggctctgagaattgtcacacactggcacaggagaggaggctattcttccagagaatttggagggcactcccatccacttacaacaaaaagcccatccactgtgcttggcagtaggtgatctgagaaccaatggaaccaggttaatcctgtggcactgttgagtgaggagagcagtggcgggcactggaaaatatcagagacaaggcaggagacctgaaatctaggcttagctcctcatatacttggcagctgtatgacctcagacaaccagtgttacctctctaagcctcagtttcctcatgcaaaaggagggggaataacaacagagcccactgcttgggggtgttgtgaggacaggatgaaaaaacaaacagaaatccctcagtacaggattcagtgcagtggacagtcttgcaaggtctggttcagccctccacccctaccctcaccagtataaagaactctggcctacaagtcagatgacctgagttttaatctcagctttgccattagccgtgtgaacttgagaaagtccctttcctttttacatctattgggatgatcatgcattttttgtcctttattctgttaatatagtgtgttacattgattgcttttcatagactgaaccagccttgtattccagggataaatctcacttggtcatggtgtataatcctttatacaaatgttgctgggttgagtttgctagtattttgttgaagatttttatgtcttgattcataaggaatattggtgtaccttccccttttatggccacagtttccctacaatgatgtagtcgaactagacaacctccaatatctttcagtattcatgtcctctgattctgtgaaactaagaaaattaagaaatagtgattcataggcacaaggcaggcaaaacttagactccttgtagaataattaggaagccaaatattcagtgtgcttatttctcaaataaccttagtttctccagtctgccccaactccgaggcctgaatatctctagatgcttatgatggcaactaaagcctaaaagctaattcattttaaagttcttccaaatgcatagggttttatttttccagacctgggttcagatggggaatttgacaaacaatggaaagggggaaaaacaacaatctaaacactgagtgacaaagtaacaaagaaatagtctagctatcagccagtcaagccagccttggctttgctatccaaagtagtcagtctaattctaccaccagtttctgttcctgtagctgtctactgcctgccagggactctgccttcccacccacaactaccaatggaaggatgtggtgaccataccagtggctgctgacatctcctgccatgggaagcataattgcctccagcagcctcccccttagatccatcatttttgttgcacttggcctgggctgtactcccggccaatgactgaacatggtgagcatagtaatgcaggcccatttctgtgaggagcaggactcctccagtaggtgactttggctcaaggactctctattggcctggttgaacttttcctgaactgtgctactgtctgagactcttcttacccaatcctctttctcgccccaattgtcacagaccacctgcattgtggtctgagtctctccccaccttctcttgctcttccctgtttatctttcacaggcatttcccccagtacattccttgaatgtctaacccgatacgggtgcctgacttttggcagacctaagcagacaaaaaggagtacttggttacctagctcttctttctaccacaaacatcgagggaaccctttttccctcacccctctgccacacccccactgccccagtgaacaaccacagagagagctgtggtataatattaggctggtgcaaaagtaattgcggtttttgccattacttttaatggtaaaaaccgcaattacttttgcacctacctagtatttgtgtccccccaaattcatatgttgaaacctaacccacaatatgatgtcattaggaggcaagaccttgaggaggtgattagatgatggggtggagctctcctgaatgagattagtgcccttataagaagaagcccaaggaagctaccttgactcttccatcacatgagaatgcagcaagaaggcaccatctactaatcaggaagagagctctcaccagacactgaatctgccagtgtcttgatcttgaagttcccagcctccagaactatgcataatgcatttccattgtctctaagccacccagcctatggtattttgtcatagcagcctgaactgactaagacagtgagccacatgagaagtgccccaacccctcccttaagcacttggctcacagatcagtgggttcatttctgcctgagttttattgttattctgtagatttcttgggctagatatatttttctgttattttccttcttcacctcagtcatgaattggttgttttaaaaaagacaatgtaagtcatggggaaactcctgacaactctactctcctagggttcctgataaaaggggattcagttgagtcctctgatggtctctacctgccaaagtccagcagcccttagcaaacatgctgctcgtttctgtagagaaggtgctggtgtcccaccatacttctctctccctcatgaagggcttgcgacccagcaaatgggtggcttatatgggtctgtttcaaaggaagagccagctctgggaagaaaaacgatgagcataagcataacctaccactgtgcctgggaaagcagacaacttttttgatgtgtgaatatctaatgagaatggaatccatcaattaccttaaacttaggcacagtcttcaaattcaatatatgtgggatatacttttagtcagtttgtagacgttatttgtaataaataatctggcttctctaaagaaattattttaagtgtttggtttggtttgatttaatggtaaaattatatttagtggcagagaattatagcaatggtgataaactatagagtgtcataagttcatatcttattctcacatttgaagctgcctgcagatgcattcaagatgcagccagaagtcaggagactcaggctgttatttggagctcatcattttacagccttgctggactcccactttctcaggggaaaaatgtggtgttgacccagattagctctccaggccctgctgagttgggcactctgtaagctggagggtcttctattgtcttcacctaagtgtcaatcaacaacccaaatgggcatgggggaagagggagctgggccaatgcccagggtgcctggtagagagataccttgggcactggaaggcaccagcttcccagagagaagggggagggccatgaaaaagttggctgtagatgccagggacactgggactctccagctgtgtgtttgtgtcttctgaagacttatgtttcattcctttggagcatgcataatcatacactgtgggatgtgttatatagattgcttgatagttcaccactgtaataaaatactgtgactggaatctgctcccagtctgcctttgatagcacttgtgcaacacacatttactgagcatttacagtgatccaggacctgtgttgtgaaaacattgatggacaaggcagatggtggagcacgtcagtgaggatttttaacaaaggctggtaagtgctataaaggaacattgtaggacactagagaacaaagaacaggagaacctgacttaggctggggtggggcgttggttagaggaggctccttggaggacatgaggtttaagctgtgacctgaggatgaatagatgttggccaggtgaggtaccggtatttgtcagccttaccagtaaaaaagaaaacctattaaaaaaaaaatacacatacaaagcctcatcagccatggcttaccagagaaagtacagcgggcacacaaaccacaagctctaaagtcactctccaacctctccacaatatatatacacaagccctaaactgacgtaatgggactaaagtgtaaaaaatcccgccaaacccaacacacaccccgaaactgcgtcaccagggaaaagtacagtttcacttccgcaatcccaacaagcgtcacttcctctttctcacggtacgtcacatcccattaacttacaacgtcattttcccacggccgcgccgccccttttaaccgttaaccccacagccaatcaccacacggcccacactttttaaaatcacctcatttacatattggcaccattccatctataaggtatattattgatgatg

SEQ ID NO: 290 - protein, 10 aa, Artificial Sequence
  PE-labeled H-2Dq/RNEU420429 (H-2D(q)
PDSLRDLSVF

SEQ ID NO: 291 - protein, 594 aa, Trichoplusia ni
MGSSLDDEHILSALLQSDDELVGEDSDSEISDHVSEDDVQSDTEEAFIDEVHEVQPTSSGSEILDEQNVIEQPGSSLASNRILTLPQRTIRGKNKHCWSTSKSTRRSRVSALNIVRSQRGPTRMCRNIYDPLLCFKLFFTDEIISEIVKWTNAEISLKRRESMTGATFRDTNEDEIYAFFGILVMTAVRKDNHMSTDDLFDRSLSMVYVSVMSRDRFDFLIRCLRMDDKSIRPTLRENDVFTPVRKIWDLFIHQCIQNYTPGAHLTIDEQLLGFRGRCPFRMYIPNKPSKYGIKILMMCDSGTKYMINGMPYLGRGTQTNGVPLGEYYVKELSKPVHGSCRNITCDNWFTSIPLAKNLLQEPYKLTIVGTVRSNKREIPEVLKNSRSRPVGTSMFCFDGPLTLVSYKPKPAKMVYLLSSCDEDASINESTGKPQMVMYYNQTKGGVDTLDQMCSVMTCSRKTNRWPMALLYGMINIACINSFIIYSHNVSSKGEKVQSRKKFMRNLYMSLTSSFMRKRLEAPTLKRYLRDNISNILPNEVPGTSDDSTEEPVMKKRTYCTYCPSKIRRKANASCKKCKKVICREHNIDMCQSCF

SEQ ID NO: 292 - protein, 340 aa, Rana pipiens
MPRPKEIQEQLRKKVIEIYQSGKGYKAISKALGIQRTTVRAIIHKWRRHGTVVNLPRSGRPPKITPRAQRRLIQEVTKDPTTTSKELQASLASVKVSVHASTIRKRLGKNGLHGRVPRRKPLLSKKNIKARLNFSTTHLDDPQDFWDNILWTDETKVELFGRCVSKYIWRRRNTAFHKKNIIPTVKYGGGSVMVWGCFAASGPGRLAVIKGTMNSAVYQEILKENVRPSVRVLKLKRTWVLQQDNDPKHTSKSTTEWLKKNKMKTLEWPSQSPDLNPIEMLWYDLKKAVHARKPSNVTELGQFCKDEWAKIPPGRCKSLIARYRKRLVAVVAAKGGPTSY

SEQ ID NO: 293 - protein, 636 aa, Tribolium castaneum
MMLNWLKSGKLESQSQEQSSCYLENSNCLPPTLDSTDIIGEENKAGTTSRKKRKYDEDYLNFGFTWTGDKDEPNGLCVICEQVVNNSSLNPAKLKRHLDTKHPTLKGKSEYFKRKCNELNQKKHTFERYVRDDNKNLLKASYLVSLRIAKQGEAYTIAEKLIKPCTKDLTTCVFGEKFASKVDLVPLSDTTISRRIEDMSYFCEAVLVNRLKNAKCGFTLQMDESTDVAGLAILLVFVRYIHESSFEEDMLFCKALPTQTTGEEIFNLLNAYFEKHSIPWNLCYHICTDGAKAMVGVIKGVIARIKKLVPDIKASHCCLHRHALAVKRIPNALHEVLNDAVKMINFIKSRPLNARVFALLCDDLGSLHKNLLLHTEVRWLSRGKVLTRFWELRDEIRIFFNEREFAGKLNDTSWLQNLAYIADIFSYLNEVNLSLQGPNSTIFKVNSRINSIKSKLKLWEECITKNNTECFANLNDFLETSNTALDPNLKSNILEHLNGLKNTFLEYFPPTCNNISWVENPFNECGNVDTLPIKEREQLIDIRTDTTLKSSFVPDGIGPFWIKLMDEFPEISKRAVKELMPFVTTYLCEKSFSVYVATKTKYRNRLDAEDDMRLQLTTIHPDIDNLCNNKQAQKSH

SEQ ID NO: 294 - protein, 649 aa, Oryzias latipes
MEEVCDSSAAASSTVQNQPQDQEHPWPYLREFFSLSGVNKDSFKMKCVLCLPLNKEISAFKSSPSNLRKHIERMHPNYLKNYSKLTAQKRKIGTSTHASSSKQLKVDSVFPVKHVSPVTVNKAILRYIIQGLHPFSTVDLPSFKELISTLQPGISVITRPTLRSKIAEAALIMKQKVTAAMSEVEWIATTTDCWTARRKSFIGVTAHWINPGSLERHSAALACKRLMGSHTFEVLASAMNDIHSEYEIRDKVVCTTTDSGSNFMKAFRVFGVENNDIETEARRCESDDTDSEGCGEGSDGVEFQDASRVLDQDDGFEFQLPKHQKCACHLLNLVSSVDAQKALSNEHYKKLYRSVFGKCQALWNKSSRSALAAEAVESESRLQLLRPNQTRWNSTFMAVDRILQICKEAGEGALRNICTSLEVPMFNPAEMLFLTEWANTMRPVAKVLDILQAETNTQLGWLLPSVHQLSLKLQRLHHSLRYCDPLVDALQQGIQTRFKHMFEDPEIIAAAILLPKFRTSWTNDETIIKRGMDYIRVHLEPLDHKKELANSSSDDEDFFASLKPTTHEASKELDGYLACVSDTRESLLTFPAICSLSIKTNTPLPASAACERLFSTAGLLFSPKRARLDTNNFENQLLLKLNLRFYNFE

SEQ ID NO: 295 - DNA, 33 bp, Artificial Sequence
  IR/DR encoding sequence Sleeping Beauty
acttaagtgtatgtaaacttccgacttcaactg

SEQ ID NO: 296 - DNA, 370 bp, Artificial Sequence
  IR/DR and chromosomal sequence Sleeping Beauty
cagtcaacttagtgtatgtaaacttctgacccactggaattgtgatacagtgaattataagtgaaataatctgtctgtaaacaattgttggaaaaatgacttgtgtcatgcacaaagtagatgtcctaactgacttgccaaaactattgtttgttaacaagaaatttgtggagtagttgaaaaacgagttttaatgactccaacttaagtgtatgtaaacttccgacttcaactgtaagaatggcccattcatctatagtagcacacaatatttgcatttgtgcgacagtataagggacaattatgctatcaggcatttttccaaagtgagtaatcgaagtttttatacctttgtgtgccatgtttgcta

SEQ ID NO: 297 - DNA, 369 bp, Artificial Sequence
  IR/DR and chromosomal sequence Sleeping Beauty
cagtcaacttagtgtatgtaaacttctgacccactggaattgtgatacagtgaattataagtgaaataatctgtctgtaaacaattgttggaaaaatgacttgtgtcatgcacaaagtagatgtcctaactgacttgccaaaactattgtttgttaacaagaaatttgtggagtagttgaaaaacgagttttaatgactccaacttaagtgtatgtaaacttccgacttcaactgtacaagtagaccaaatatccatatacataaaagaaaaaaatagaaaaaatttctagtgacagaaaaatgacaaagaacatactgctttattactactattaagatgtttgcttccattacactcatatgagtca

SEQ ID NO: 298 - DNA, 227 bp, Artificial Sequence
  IR/DR of Sleeping Beauty
ttagtgtatgtaaacttctgacccactggaattgtgatacagtgaattataagtgaaataatctgtctgtaaacaattgttggaaaaatgacttgtgtcatgcacaaagtagatgtcctaactgacttgccaaaactattgtttgttaacaagaaatttgtggagtagttgaaaaacgagttttaatgactccaacttaagtgtatgtaaacttccgacttcaactg

SEQ ID NO: 299 - DNA, 371 bp, Artificial Sequence
  IR/DR and chromosomal sequence Sleeping Beauty
caacttgagtgtatgttaacttctgacccactgggaatgtgatgaaagaaataaaagctgaaatgaatcattctctctactattattctgatatttcacattcttaaaataaagtggtgatcctaactgaccttaagacagggaatctttactcggattaaatgtcaggaattgtgaaaaagtgagtttaaatgtatttggctaaggtgtatgtaaacttccgacttcaactgtatatcctccccgttgcaccctcttgatgatgctgagatgaacacagatgctcactccttgagggctctaagcttatgctgacacagacacaggtgctcacttctatgaatggcctaagatttgaggacatcatgagg

SEQ ID NO: 300 - DNA, 229 bp, Artificial Sequence
  IR/DR of Sleeping Beauty
ttgagtgtatgttaacttctgacccactgggaatgtgatgaaagaaataaaagctgaaatgaatcattctctctactattattctgatatttcacattcttaaaataaagtggtgatcctaactgaccttaagacagggaatctttactcggattaaatgtcaggaattgtgaaaaagtgagtttaaatgtatttggctaaggtgtatgtaaacttccgacttcaactg

SEQ ID NO: 301 - protein, 1468 aa, Artificial Sequence
  ET3
MQLELSTCVFLCLLPLGFSAIRRYYLGAVELSWDYRQSELLRELHVDTRFPATAPGALPLGPSVLYKKTVFVEFTDQLFSVARPRPPWMGLLGPTIQAEVYDTVVVTLKNMASHPVSLHAVGVSFWKSSEGAEYEDHTSQREKEDDKVLPGKSQTYVWQVLKENGPTASDPPCLTYSYLSHVDLVKDLNSGLIGALLVCREGSLTRERTQNLHEFVLLFAVFDEGKSWHSARNDSWTRAMDPAPARAQPAMHTVNGYVNRSLPGLIGCHKKSVYWHVIGMGTSPEVHSIFLEGHTFLVRHHRQASLEISPLTFLTAQTFLMDLGQFLLFCHISSHHHGGMEAHVRVESCAEEPQLRRKADEEEDYDDNLYDSDMDVVRLDGDDVSPFIQIRSVAKKHPKTWVHYIAAEEEDWDYAPLVLAPDDRSYKSQYLNNGPQRIGRKYKKVRFMAYTDETFKTREAIQHESGILGPLLYGEVGDTLLIIFKNQASRPYNIYPHGITDVRPLYSRRLPKGVKHLKDFPILPGEIFKYKWTVTVEDGPTKSDPRCLTRYYSSFVNMERDLASGLIGPLLICYKESVDQRGNQIMSDKRNVILFSVFDENRSWYLTENIQRFLPNPAGVQLEDPEFQASNIMHSINGYVFDSLQLSVCLHEVAYWYILSIGAQTDFLSVFFSGYTFKHKMVYEDTLTLFPFSGETVFMSMENPGLWILGCHNSDFRNRGMTALLKVSSCDKNTGDYYEDSYEDISAYLLSKNNAIEPRSFAQNSRPPSASAPKPPVLRRHQRDISLPTFQPEEDKMDYDDIFSTETKGEDFDIYGEDENQDPRSFQKRTRHYFIAAVEQLWDYGMSESPRALRNRAQNGEVPRFKKVVFREFADGSFTQPSYRGELNKHLGLLGPYIRAEVEDNIMVTFKNQASRPYSFYSSLISYPDDQEQGAEPRHNFVQPNETRTYFWKVQHHMAPTEDEFDCKAWAYFSDVDLEKDVHSGLIGPLLICRANTLNAAHGRQVTVQEFALFFTIFDETKSWYFTENVERNCRAPCHLQMEDPTLKENYRFHAINGYVMDTLPGLVMAQNQRIRWYLLSMGSNENIHSIHFSGHVFSVRKKEEYKMAVYNLYPGVFETVEMLPSKVGIWRIECLIGEHLQAGMSTTFLVYSKKCQTPLGMASGHIRDFQITASGQYGQWAPKLARLHYSGSINAWSTKEPFSWIKVDLLAPMIIHGIKTQGARQKFSSLYISQFIIMYSLDGKKWQTYRGNSTGTLMVFFGNVDSSGIKHNIFNPPIIARYIRLHPTHYSIRSTLRMELMGCDLNSCSMPLGMESKAISDAQITASSYFTNMFATWSPSKARLHLQGRSNAWRPQVNNPKEWLQVDFQKTMKVTGVTTQGVKSLLTSMYVKEFLISSSQDGHQWTLFFQNGKVKVFQGNQDSFTPVVNSLDPPLLTRYLRIHPQSWVHQIALRMEVLGCEAQDLYV

SEQ ID NO: 302 - protein, 147 aa, Homo sapiens
MVHLTPEEKSAVTALWGKVNVDEVGGEALGRLLVVYPWTQRFFESFGDLSTPDAVMGNPKVKAHGKKVLGAFSDGLAHLDNLKGTFATLSELHCDKLHVDPENFRLLGNVLVCVLAHHFGKEFTPPVQAAYQKVVAGVANALAHKYH

SEQ ID NO: 303 - protein, 147 aa, Homo sapiens
MGHFTEEDKATITSLWGKVNVEDAGGETLGRLLVVYPWTQRFFDSFGNLSSASAIMGNPKVKAHGKKVLTSLGDATKHLDDLKGTFAQLSELHCDKLHVDPENFKLLGNVLVTVLAIHFGKEFTPEVQASWQKMVTAVASALSSRYH

SEQ ID NO: 304 - DNA, 29230 bp, Artificial Sequence
  HDAd35-T4-Ef1a-mgmt
  misc_feature (1)..(481): Ad35 5'end
  misc_feature (14126)..(14159): FRT (Complementary)
  misc_feature (14220)..(14463): pT4 LIR
  misc_feature (14491)..(15825): EF1a
  misc_feature (15843)..(16466): mgmt
  misc_feature (16484)..(16705): pA
  misc_feature (16735)..(17000): pT4 RIR
  misc_feature (17107)..(17140): FRT (Complementary)
  misc_feature (28823)..(29230): Ad35 3'end
catcatcaataatataccttatagatggaatggtgccaatatgtaaatgaggtgattttaaaaagtgtgggccgtgtggtgattggctgtggggttaacggttaaaaggggcggcgcggccgtgggaaaatgacgttttatgggggtggagtttttttgcaagttgtcgcgggaaatgttacgcataaaaaggcttcttttctcacggaactacttagttttcccacggtatttaacaggaaatgaggtagttttgaccggatgcaagtgaaaattgctgattttcgcgcgaaaactgaatgaggaagtgtttttctgaataatgtggtatttatggcagggtggagtatttgttcagggccaggtagactttgacccattacgtggaggtttcgattaccgtgttttttacctgaatttccgcgtaccgtgtcaaagtcttctgtttttacgtaggtgtcagctgatcgctagggtatttaccggtattcaaggattacatgagcttagaaatgtaattagcatagtgtgtggcatagtgtagataccaaataaatatgatctctccttctactcttgaaaatgcaaacacattcttggtggtcctaaaatagcctgtaacatggtttactcagcagcatttgctattcaaggcagatctgcctttagtcattggctgcgctcctgaacagctgtgtgaaaggctaacttttgtaaaccaaatcaaaataaaatgcagcaaaaatttgtcactgaaaggaaatcctcagtatatccttttatgaaatgaaagatccctcatccaaacttaacttttttaaaagtgcgcatttggagatatagccctttcttatgaatcctaattcaattttggccataaacacacgttgatgttccccaccccaaagcacatagcaacaagagtaggttctatattgaaaataatgacaatttaaaaacatgtacttatttcactgtatgtggacagtgtctatgattgcatcatgaagtgtcatataaccatgtacgtgtacatgagagagagatagagagagaagtggtagggtggtggtggtagaggggatggcgatagtaatcatggtaatggtagaggtgatggaggtggtaatgacggaggtaagggtggtagtgatgatggtggtggtggtaatggtggtggatgtggtggtggcaattgggatggtgggatggtggtagccatggtgatggtggtaatggtgttgatttaaagggtggtggtagtgaaggtgagggtagtggtggtggaggtggtggtgctggtagcaatagtgatggtggtgatggtgttgatgagggtgttgggatcagggtgagttcccacagtatatttcattcttgttgtaccactctgtcaacagcaccactgactgggacagaggaagaaggcacactctgaatgtgttattaacagaaacctcaaaacagtctgtctccttgtagtcattcaaaattatctttttcttacctggaaaactgaaactgaattaccgggaaaaacacaggagatttttgtttgttaatatgctgccaataaagtaattttatgtcaaatttaactacaggaaagggcaaggcattttctaagttccttagatgtcatgtggctaaaaaaaacaaaaggatggacagcagttagatactgtacacttagctgtttgaagccatatattcagaaagcagatgttgggagttggtgtttgaggactgatttcctggaggtattttatataggccaagttcattgttctaaactctaagggcttgacttgagggaggaaaagaggcaagaacatgtttagttttgctgacagcatcacatgggcagccctaaggctagacaactttagggcctgaagcttattctaggaaagaagcacctacagagtggcactgggctcccctccactatagagatgaagtcatatgacagtaaagggcaggcagggctgcctagggggcccagaactgacacttccattagaatgagcacaggccagggagagaagtggggaaccagagagaaggagctggaattctagtaggacaaacggtaagtgaacaacaagaacaagttaagagtgtgtgcagtattctttcaaagactgaaaaaatagtgatgtgatagaatggcaggtggctctgagcaggccaggagaaggactgggggcagagcatcccaggcaggagggcagcaagtgggaaggccctggggtggggcttttggactgttccagtgacgggcaggcagccagtgtgcctgtcacacaatgcaccagggaagtagtcgtgaatttgcagagggtcttgcaggctatgggaaagggattggattgtattttgtttgtagggaagccatcgggggacttaagcagaggaaggattggcttcatctctttgaaaaagttctctctggatgctgatgggaggagaaatggaaggaaaagaaacacttttaggggcaagaacttttgagaagggtggaattgggagtgtggagttggggccagctttggcacaggaggggaagctaaacacgtggccgcatgagggcctgtaattctacctgaaatgggtaccatttgttagggtaaacaaatgaaccaaatgcccagtgatacagaccaagtgttggcaaacttcttctgtgatggcccaggtagtaaatgtctcaggcttcgcaggccatgtggtctctgttgaagctctgtgtagtagacaatatgttaatgactgggcgtgactgtgtgctaataaaagtttatttacaaaaacagcccgtgggctggatttagctcacaggctgtagtttgccaacctctgacctagagcatgaactgagcatcttcttggagggaaataagttctttccaagttgccctcctcacattgcagggggccatgtaggcccattattcacagaagagtgggtgggcaacctttctggagcagaaaaacgtaaagatttcttccgtagtgcaagtaaggtgaccatttctaaaccgtgcaagtgatccagcagtcccaaaagttgtttcacttctcattgtgcgcccgttctcaggtgctccgaagcttccagtcctttgtagggacatggatgaaattggaaatcatcattctcagtaaactatcgcaagaacaaaaaaccaaacaccgcatattctcactcataggtgggaattgaacaatgagatcacatggacacgggaaggggaacatcacattctggggactgttgtggggtggggggaggggggagggatagcattgggagatatacctaatgctagatgacaagttagtgggtgcagcgcaccagtgtggcacatgtatacatatgtaactaacctgcacaatgtgcacatgtaccctaaaacttaaagtataataataaaagaaaaaaaaaaagagaggagagaaacatcatcccctccaggatacccttgggccttgttcttatagtcttgtacattgttgaacaatttgcatgggctagtggattaaagcacaccctccaccctcaggccctcaagggtctctatgataatacagtctcaccttctaccctttccatcaccatcctaggtgctatggccaaccttgaggctgccatgttaggtctatgcatttcccacctccaccacataactctctgaaggccaggtagtttcctattcatcttggtaaccccaaagcctcgtgacagggctcagctggcatctgcggatgtgaatgaaccattggagaaaatggtactctgcaaataactctgttattttcccatttcctgtgtaaggcctagagacaatgactttttaattgcaccccttcccctctgtatgacactggccttctcttgtgtccagcaatgtgggtggcctagatgatttctaagggacttctggccaagatgaacagcagctgcatcttactgagcatttactatgtgccatatactcagccacagctctaggggcatagaagcaggagctctcagggtcagggcagtgagtgagcaagcgagcacctatgccagccctgcctctggatggggacttgagagggtgatggaagcctgcagcactggagggaggcagacaaagacaggcctgtgctgagggggcccggagcaagagagagggaggcaatgacagcagagacatgcctgcgccttgggtttgagtgcccagtggtcaaatccacttccctgtggctgatgcttgcctttctaactttggaatttaggggttggagatctggtgagaaggtaggagggagatgaggaggagaagggaaaggcaggaaggaaggggagggaaaggaaaagcaaaaggggaggaggaaggtttccaacaaattattctatatcaactgcggaaatcaaaatttgttgcccaaatcttagaagctcatgtccctcctccccagaagtctggaatgcagcactccaggggtagcttataacccaaatatctatctgtaaaaagagaaacattgggctttcgagctgtggattctcagtaaaagcaagaggcctcagcctacacaggccagcccagagtttgaggaaccccaggcccacacccacagggctggcccctgggtctgcatactccctagaaatgtgcacacttctgagcctcaactctgtcctggagtctaacagcatccctctccttcctggggcagttccacctccagaaacctgttaccttgggccttatgtcaaggaaactgtgggaaagagctaggcaggaatgcagatgaggccagcatgggctcctaaaagtttagaaataggcagtgtcatgctcccaggtgcctgcataaaccagctgaaaaatggagctcccctcaccagcactctcccttcaaacagactgtgatttgcaggtcactggtttaccaagccaggctacccaggcaggacccagatgccaagcccagtggtgtcctgcaagctgagcagtgctcagttcttgcaaaaaaaggtctgtgtgaaggcaaggcctctgcctggcttctcaccccagttgggtgtctggaacaggaaggagcccttactgcagaaaaaggaggagggagcaaagggagcgaacagctgcgtgctccatggggaggatccccaaagtagaaaggcgcatacacactgcagcccttgacccagaatgctcacagctacattacagattcaggtctcctcagtgtagtggggctgctgatgagactgtggcatcctcaggggtcaggacacacattttccatcactcttctgatggcaaaaaacctctgagccaatgccaacctctgatcattaaaaaaaagtgctcacagcagtgtgtggtttaggatcatgccctgtgtggtttggaacacgtgcacaaccacaccttgttcatcaccatcccagaaaccctgacgcaggcaaagagcagagttattaaccctactttactgatgtggatactgaggcccagaggctcatgcaagttatcaataagtggcagggacagttgcctctagattaactagcccctaggatcacctgggtcttggaaggggacccataaacatgagctcccctctcttggggccagatttgcacctgtgccgcgccttcagcctgcatgaagtaggggctgctggcaaagactcaaagctgtaaatctgggttttctcttgaggcttctaagggagctgtttcgacaactcactctgttcccagctggctgcccctgcatagggttttaaagcagcctagctttctgccaggcttggcagtggacaacgctggtcagaacatcccagagagctaccagaatgaagtaagtttgcttctactctttacctgtttatgggctgtctctgccactggaatgaaaggcactgagaacagtgcctggcctgcagaaggccctggaaatacctgagctcctaatctgggaataggagtaggaagagctttggaggcagggcacctgagtttgagatctacaacttcctgcctgtgtgacattgggaaagtctccatcctttctgagcctcagtctccaccctggggaagtggaaatatcaatctctgtgacacagaagcaaatgagcgaatgtgcacaaagtaccttgcacaagagagacgctcaaacacttgcctccaggtttcaccgagaactacagagtaagatagatttgttcccagtggaggaagcctgggaataatttgcccctagactatgaattcctggggctcaagatcgagcacagggccaggcacacagaagggaccctggaaatgtggcaggaggccagagatagacaggcccttagagctcatacccatgccctctgacctcaagaagaaagaaacctgctcaaaatctcacaaagagcttgttccaaccctgaatcgagtctgaggactccttcctgagtccagcactttttctgcaagaagtatatgcctccaaagctgatgggcgcaaatcttgaaccccgtcacataaacacaaagggaggaggtgactagagctcctcctactggatatgtctaaggtcaccagtctaaagaaaagggatggatagaatgaggccagtatttttgcagccatccaaatgtccacatacgctgttacactgagggctcctctctcccccgtcttcagccctacttgcatttagaggtgagaaagatatgggctgaggggttgtttttcatcgtattgtagatggaaagcacactgcccttggggccatccaaatgtggaccttgatgtagcaccccaccttctggatggccatccttctgaaagtcactgaatttctcagactttattctctttatccataaagaaggagaataataataatccccccaccctgcccaaccactgactggttgggaagctcagaagaaatactgggcacggcatcccattgtaatctatagagtgagtcgcttcttaatattaaatggctgaacacagaagatgtgcaaaaagtactgtgtccccttcctcctccaactgaacatttcatgccctttgcaccctcattttgtctaggagctgccttatgaagggaataggtacctgctccgagctggaggaatctttgccacttatggtggggtatggactgagacagagatggcatgtgacatgcgcactgagtctcaactccatgcaggctctggagcactctcaaattggagtactaatgccttttaaattctcacactagcaatcctttgacctactgatctagggatctagggaaagaatcgtgatcttaacttcaaagggaaggacaaaatgttctgcctcctgttaaaactccatacactaagtgcagagactggatgccttattaaccttgggtagatgcccaaatgttcaaaaggtcaaactcttctgttccccagatcgccagagtcattaaccagtcacactattaaatgaatgaacagatgctgaaaaggtacttgcattactgagatttcttatggtgatggcccctgcctgatatgtattcagcattttgtagttttcaatgtgcattagagtatagtggtgatgacattggcctctgagtttgccacttcttatatctgtgactttggtcaaattgcttaatctctctgagtctcggtttcctggagataataatagcttcttcttcccagggttatcatgaggattacaggagataatgccccaaaaatgcttagtaaagtgcctagcacctagtcaatgctgaattaaaggtggttattcttacttttcgttcatttgaactttgttctcagggagggcaaaggatagacaaagccccatagctagtgaggagtagctgcaagactagaacccaggtgttctgagccctagtcttaggccaagaacaactgttacgtgagatgcacgttttccttcaagggagctcacaattatttccatgtaaattcaaggactgctaaaagagaactctcctctgggactgatatcattttatttcaagattgatttgaaacatgttttttgtttgtttgtttgttttctaggaaagaacaagagaaccagttaagctgaatgcctgaagcaaatccctgttagcgatgttttcaggatgagggagagtggtgcaagaaacgtgcttccagatgcacatggtttcctgggactagggttcagggtgtcatccctgggtgttattaagtgtcagaaggagagcaaacaagggaaacatctgagatccagctaaggctacaccctggaaatgcaagcccagctcttgcaaaggacctcctttggccactcaccttccaggccttacaataacttgtttggactgcaggtttcttggtggactcacaggccattctgcttttatttggtcaacctcagttcacaagcacccagatgctgagatcctcagcatgtgcagcagagtttcatattagcactgggtacctttctgaggctacagggataccgtacagcagcacctgtcacgtccagccaaaggagtgggctctctcaatgtcatccaatgctgtttcaactgtgaagaagaccatctgagagagttgcttttggaggctgaggcaaatttttaaaattctttgttctcctcaactggggtgaattcttggtcttctaggacagcttgaagttttagaaagagtcaagccactcagaaccaacagagaactctttcagagaacaaggtgtggcatagaggaggcagagggctgatcttgatcaaatccaaagtgtgactctaaagcaatgaatgtgaatttttggcaaagcttacaaagggctctaaaggccatctgcaaagagaagccaagcctgatcgatgaatcactagtgcggccggatatcgatcggcacgctgttgattttctcatagtaaggaacagtgggccctttcagtcccacttctgtagtctgtggtactacaaatggtgagcccatgatgttgccattcatagggttattctccagcagtaatgactggccagccactcccatagccgcggggctaggatttattgtcaatggagggacctgcagttctgcacaagcagtactaggatgagcacctgggcccattgcaagggtgacatcttcaaggcaaggcctcttaattttattagggtagcccccatcagccatgtctggaaactggaagtggtcttcttcttgtctcctcttaacagttccctgtgaatggaagagaagagaggaggagaagagaggagaggagaagggaagagaggtgacacacacacacacacacacacacacacacacagagagagagagagagagacagagagaaagagagagagagagagagaggaatttttataaaggtttggcacattaaagctaatgaacaggaaatgtgcatgataaaacagacctctcagtttaaagacttatagttgtgaaaactataaaatacagcctgtctttggaaccatagtgcttatttattcattattatgtttcatctaaactgtctaattacatttcaaataaggcattatgttgtctgtatactaaaacgggatagaacgttattcaaagggtaatctgcccacttcaaggagagttcaacaaaactatgcagaagtcactaaatgaaccatgctgccaaaggcaggcattggagagaaaactagaagtagctaaatagttttaattctttcctgtctacagacacatagattttaacgaaggaataccatagtatagaattgaacttttaggctgccttctagtcttggttaaatgcatcaggctgcagtggtaaaattgaatacaacagagcccttacaggaaagaagtagatctggatgtgttttcttggggagctgtttaaaatactgtttttgggaaagcacaagtttcagaacagtcattgtaggcatcgtattcattgttccatttatttttacacacacacacacacacacacacacacacactctcacacattgctatgtgtacacaaaaataatttggaagaacctatacccaacaatttggagtggtcatttatttgggatgactggcaattccctttctattctcttcatttctgcttgtttgtctttaacgagaacgactcataatccaaaaatttaaaaaagtataaagttatctaaataagaaattttcctctgaagatgcatcctcaggttggggagatattaaacaatgagaaaaggccccaatctgggatctgaaccttgggggagctgcccatcatttatagaagcacagcctttgggaacaaagcaaagtcactagcaatgtgagacttcctactcttcatggcttcatacagtcatccatcgctgttgtgttaatgaccatgacctgtatgttagcaggtaaatgggaaaggaagtgggggcaaaggagtatgtgcaggaatgatcaaaataaggaaaggaagagagggatctggaaatcacctgaatgccgataggtgaacaggtagaattcttttaaagcttcccccacccggtaccccccaaataacccctttccagctttggaagtttcactaggacatacagtgctcatcctctgatgtcaccttaagtttggctcttctggtttgatgagcttgtagcccactaggagctcaaggcatgcatggggccacttgccagcacgatgaggggcatgactgtcatggccaagtgaacatcaaagcagatccccagggctgtatgtctcaggccttggtgcacatcagaatcacttagaaacatccacattcctgggccctcccaccacaaactgacagcttcatccagggtgtggcccaggcatcgggagtttttccaacagctccatggctgattctcaacagaaaaccactggcccagagcaagggtggaggcagcgtggcatagggctctgaccttggccttgccactgaacctctcagagccccagtttctttatgtgtaaaatgagtgtaattatagttcttttctcatgaaggtgctctgactattaagtgaaacggggcacattgtatgacacctaatagctcctcactaactggtacccggcattataaagggcaggtatggaagggttctgggagtccaatacccttcttaaagacagagaggtctctgagacccagagaggggcaggccttacccagagttgctcagccagagggcaacaaggcccaggtcagatgcagggcccctccaccaccactcagctgcctccagacccactgccttcgccatgttgttggtaggacactgcatcgcccccacagaaggggcttgccaacttgagtgagaggacttgcacacttctttgacttttcttttgagatgcccacaatctgaacaagggcacttcaagggacagctctgtcaccaaactcatctgaggcctgaataccatgggtcaggcaggaatgggttggagaggtgtagagcaggcacaataagagggctgaggcccatgcagtcatcagtgcccactttcccaggagtctgactgggcacagcacccatagtgtccctgagctggtccatggagcagctcactaactgtttggcccacagcaggtgctcagtaaatggcagttgaacgaatcaatggacaaaggaacataaattacccaacacacagggagctcagccatttactcaatccattatggagtaacctacaaacaagccactgggtcccaaactgaaattgtgtctcttctacattctcccaaagaatccaataggttaaaaatagaaatgtatgaaatagatcaatcagggatgattgcatgtggatttgacataaggatcccctgcagggagtctgagctggcaacagtcaggcccaaagtgctgtccatgatgtctcgaactgcaagacagttttaacaatggcgaagcaatgcagaaccaggcaggccaaggagggggtgggggttggggaaaggaagggagggaaggggctgtgaggggcaatggtctggcatccctgccacgtgagcctctgaaatttgctggcagcttctatgggctcccagagctttcacttaattgttggtctgccactaacctgctgggagtaaggtgcagggatggaggaggcagggcatgaccaccagacactaaaggtaccagctggggccactggcaaagggaaggaggctgcacctctcctacatgagagcccgtatacacacaccttttccagcactcatcaactgcatcccaagcaaatggtccctgatcaattccaattctagaaaccaactgactactcaataacaaagtagatcccagcaggccgccactgctggagcggatgccacttttgctatgccaagtctgtggctggacagctgctggcatgtacactcactgactttcataaggatgcctaataaagggggcaggctcacctggcttttctcaggggtggggtttggggtgccgatagaggctgctgttttggcagagtggcaagctgcaagcctcttctgagctttcatttttcaatggacttcagtgagaattcactttgtcagaggccatgcagctccatgttttggatttcatggaatgagctttcaacagtgagcctgaagtgccctggctgaacagcaagaacaccagccaaccctaaacaaggccgaggagaggcggctgtgtttacacggaaggctcagccttgctgtaatagcgtctgccttcaccagacatcagtgaggcgtggaaatctattatccagttaattttgcccctagataaagacttgctttcgtgtcttctctttcacagtcccatgatctgttactcatctcaactgcgagaagttggctgggctttcccctgtgcccagtgccacactcgtgccttcactgggtcacctgtgcctgtggctgatgccgctgaggttttgcctgcccagactgggtgtttctgactaaatcccacagccaccattttagatcaagggcaggagatagctcactgctccggaatgacctcccctcccagaatcctggtaggggcggaaggtccccaaccaagctcccagccctttctaaatgaatctccctgcttcacccatgtgcttttctccagtctctgcggtcttgatgacagcagggtattagtcctagctgtcccacagctcctacttctttcaggcctctccctgtgacaatcagtagccactggcaggatttcctcagagcatatctcgatttgctttcagacaattagttaaaaggacactggaccccagacgtcccaactcccagccagagccctcacaggcccggcctttggtggtgaggaagggggagggagtgagtgacagtgccctggcatcttttagaaacgaattcctttctctccatacataaatgcctgcagagtcccatttcagaatccggcagacaaagccaccaatgtgatccccatgaccttataaacattcattaaaatgcatttcaaggcatgtgatggcctccccaccccctagataatgagaaaacaaaggtttctcttctgatagagacaagttcagctctgaagtcaacattatttctggttctgtctgaacaatgacatatggcaactcttccctttctatagttctagtccagaatgacaaaaaaggggaaaaatttcttagagaaggtagagattatacgaatacagtccatgaaatgagcataaggagaataaagaatataacttatccaaagaagtctggcaggctgttataaatgcttgattttggacactgtagttggaggtttaacatggacaccaataaaaaggtcagcaaagggtatgcactgttcctattgggcaagaagataggaggtcaaaggtaaccaggaaagataaactcagggagacttattttccctccagagggcactgggcttgtaggccctgggcaaaattgtcaaaaaggtgaaaatcgcctgtggtttatttagtctgctctttcttcactagtgcctcaccagttcagttcaggccaatttgctagaaggtagcgaacgatcgaccggtgaagttcctatactttctagagaataggaacttcggaataggaacttctacctagatgcatgctcagagcggcccctagctagcgtttaaaacctacagttgaagtcggaagtttacatacacttaagttggagtcattaaaactcgtttttcaactactccacaaatttcttgttaacaaacaatagttttggcaagtcagttaggacatctactttgtgcatgacacaagtcatttttccaacaattgtttacagacagattatttcacttataattcactgtatcacaattccagtgggtcagaagtgtacatacacgcgcttgactgtgcctttaagcttttaattaatggatcactagttgagtaattcatacaaaaggactcgcccctgccttggggaatcccagggaccgtcgttaaactcccactaacgtagaacccagagatcgctgcgttcccgccccctcacccgcccgctctcgtcatcactgaggtggagaagagcatgcgtgaggctccggtgcccgtcagtgggcagagcgcacatcgcccacagtccccgagaagttggggggaggggtcggcaattgaaccggtgcctagagaaggtggcgcggggtaaactgggaaagtgatgtcgtgtactggctccgcctttttcccgagggtgggggagaaccgtatataagtgcagtagtcgccgtgaacgttctttttcgcaacgggtttgccgccagaacacaggtaagtgccgtgtgtggttcccgcgggcctggcctctttacgggttatggcccttgcgtgccttgaattacttccacgcccctggctgcagtacgtgattcttgatcccgagcttcgggttggaagtgggtgggagagttcgaggccttgcgcttaaggagccccttcgcctcgtgcttgagttgaggcctggcctgggcgctggggccgccgcgtgcgaatctggtggcaccttcgcgcctgtctcgctgctttcgataagtctctagccatttaaaatttttgatgacctgctgcgacgctttttttctggcaagatagtcttgtaaatgcgggccaagatctgcacactggtatttcggtttttggggccgcgggcggcgacggggcccgtgcgtcccagcgcacatgttcggcgaggcggggcctgcgagcgcggccaccgagaatcggacgggggtagtctcaagctcgccggcctgctctggtgcctggcctcgcgccgccgtgtatcgccccgccctgggcggcaaggctggcccggtcggcaccagttgcgtgagcggaaagatggccgcttcccggccctgctgcagggagctcaaaatggaggacgcggcgctcgggagagcgggcgggtgagtcacccacacaaaggaaaagggcctttccgtcctcagccgtcgcttcatgtgactccacggagtaccgggcgccgtccaggcacctcgattagttctcgagcttttggagtacgtcgtctttaggttggggggaggggttttatgcgatggagtttccccacactgagtgggtggagactgaagttaggccagcttggcacttgatgtaattctccttggaatttgccctttttgagtttggatcttggttcattctcaagcctcagacagtggttcaaagtttttttcttccatttcaggtgtcgtgagctagacggtcgccaccatggacaaggattgtgaaatgaaacgcaccacactggacagccctttggggaagctggagctgtctggttgtgagcagggtctgcacgaaataaagctcctgggcaaggggacgtctgcagctgatgccgtggaggtcccagcccccgctgcggttctcggaggtccggagcccctgatgcagtgcacagcctggctgaatgcctatttccaccagcccgaggctatcgaagagttccccgtgccagcgcttcaccatcccgttttccagcaagagtcgttcacgcgtcaggtgttatggaagctgcttaaggttgtgaaattcggagaagtgatttcttaccagcaattggccgccctggccggcaaccccaaagccgcgcgagcagtgggaggcgccatgagaggcaatcctgtcaagatcctcatcccgtgccacagagtggtctgcagcagcggagccgtgggcaactactccggagggctagccgtgaaggaatggcttctggcccatgaaggccaccggttggggaagccaggcttgggagggagctcaggtctggcaggggcctggctcaagggagcgggagctacctcgggctccccgcctgctggccgaaactgaagcggccgctcttcgagcagacatgataagatacattgatgagtttggacaaaccacaactagaatgcagtgaaaaaaatgctttatttgtgaaatttgtgatgctattgctttatttgtaaccattataagctgcaataaacaagttaacaacaacaattgcattcattttatgtttcaggttcagggggaggtgtgggaggttttttaaagcaagtaaaacctctacaaatgtggtaaaactagtaatcgatttaattaaagatctttaaacaatttaaaggcaatgctaccaaatactaagcgcgtgtatgtacacttctgacccactgggaatgtgatgaaagaaataaaagctgaaatgaatcattctctctactattattctgatatttcacattcttaaaataaagtggtgatcctaactgaccttaagacagggaatctttactcggattaaatgtcaggaattgtgaaaaagtgagtttaaatgtatttggctaaggtgtatgtaaacttccgacttcaactgtagtttaaaacgggcccgtagtctagggccgccagtgtgatggagttcggcttcaggtacagcacactggcggccgttactaggtagctagagccttcagactctagggaagttcctatactttctagagaataggaacttcggaataggaacttcacccatggcgatcgctagcctctaactcctagaccgtcagaactgctgggcccttcaagacgggctgctcacacccactcatgttaagcctggtgaggcctgtactctgttttcacaggaagaaatcctcacccagtcttccccaaacacattcccaggttgtgtcattagtgggatagagatgattattgtggggagaagagaaacatctggatggatttggtgaggttgatctatagaggaagtaggtgctgcctgaggtagctgtaatagaagctaaaggtcaaaggagagggccctgtcccaatccagatgactccacttctgctggacccaggttcacaagcttaatctacatttcacctaaatttggctaacaagcccaaaatcacacaggcaaagggagaagtggaggcagaaccgaggttggaggccaccagggccaccgggcagagatcatttaagcccaaccttctcacttctccctgggctctgcctctcttaaaggaccttgtggtgtgacctcttgtaggtccctttcacactcggggcctcagtttccccactgtaaagtgaatgggtcccagctttggtaagcttatgcttacctgatgctttcttcctgggctgctcttgtagagaaaagataaatcttcttcctccatccacgagggctcctttccctgggggtgagagtaggctgaggagagccacttgcacacacccttaaagaaagtattacctgcaccagctcagtgagaggcacagatcagactgttacttgaatcaaattatgagcctccccaaatatatctatgacatttaaataggggattacttgaacatagactgtgggatccggtgtggagtgcgggagactagcaaagtgaatcctgagagtagcaggtctgcacctgttggatcgagaaaggcggcctacaattctggtcaaatgagctgtgcttattgacatattctattagagagtactaccaggtcaccagtcaccagaaaggctgccagctctccaaccacctccagggaactatcctgaatggggccttaacaagtctaagagagggttggtttgggtcccaagccaatatttgctctgctttatgtcagtcatatggaacccaaaccaaccctctcctatgtgcctcaccagtcggtgcagggatcccaatttcaagtttggttttttatggtcaaagtccagcatagattaaatgaaggggtgtgatgatggtgttaaaagagaactccagaccagtttaactcttggacacacatcccatctcaccatggtgcttccaaccttccagagatgatgggctcctattttctgatgacaaagccctccacaggattgctgcctggccatcagggagtgcctctgtaactgaggctgagatcccactttcagtcctccagctgtggcccatccctgctccgcccaccgggtatggcctgtcctaggctcttaggtatggctgcattgtgaaatgatggctacagagctggcatctcctgtagtctggttcatctagtgcactacctcatagttaaaagaaatctgtttaagccactgagggtggctcctagtgccaactccaagaacaggaagcttcccttttttgggaggaggggcagatggtaacatggatcgtccaggtcaatgggagcagggcaaccacagtaagtactggacaacaacacaaaactccatgtgtggcttccatcgagtccctctccaattggtttggtcttctccgtcccatgcagcactttagcaaggggcctggctgaaggctatgaattgtgtggagcctcctcattgcagtctccaaccatctgatgctgggaaaatgtcaccaggatgcagccatgccgtgtggccaatgaaccgagaaaacaccccttttctagaatgctctaaagaggcagaataatccagaggtgaggaaggaaatactccaccagagacccaggcagttcctacaaaagccagactttccttcacctagggagtgacaagaccagtggaaaacactctcaagcagtaacccccaaatgctctgcaagccagtggcgtccagataccgcacaagcgagtgggctgtctaatcccatcatcatgatgtaaatatctctaggctgccctgggctgtgcctgaccctgtcttcagctttccacacctccacctacagcccatgcacagaaggaccacccaggaatgctgcaagtgtggcacctccagggccacccagggagaaggagggcagctatgctggtggctccaggcccatttggcgggtggtaccttcacaccacaaagcccaaactgaggccccagatttggctgatgagggcatattggacaggggtcacttatgctcttccccattgccacctggcctctggctacctggacttggctacctgtggatcctctcacaggtgccaccatcttggctgagtctccagatgcgaggtccctgaggcagtggcgggcttctcgctaatgctgatgggattaggaatgggataggtggggagggccctggactgggccctgatgagccaagtgggtttttagaggggctactggtacatttcagggacaggacatctggtagagctaagctggggcaataaggagccactgctaatctgagagctagaaacaatcagcttctgggtcattattaattagggtagtttgggctgtgtggaagtcacgtactatatggggtagccacagctctctctacagataatctctaagacttctgattgggactgtgtgaatgcagtagcaatatctcttcttactgccaggccctgccagtcctgcctccacgccctggctggccccccttatgatctgacccatgccaggctgccatagtatgttacttctgcattagcactccttgggacctgcctctccactgtccctcagactttaaagaactatacaaacccaaggggctcttcccaagagaattgatatgacttgaggtgattccatttctggaagtagtcactccattttctgcctcactctttcagtgcttcacagagcaggttcgaacgaaggagccatccaactaaccgtcatgttcgggcaaccgaagaagggagtggcaggatttcctttggagacttctggaattagacagcagtttaatgcaagcatctaaattctctccctcccagagtctcattaaaactacagtaagagtttgtgttttgttttgtttttaaagacaaaatcccaccaggatagagagaataggagaggagataacagcatcataatttatgaaactaaaatgcagatagaccaggattaactgactacacagcaccaaggaagctgaatcacaagacagcagaggagaaaactggaaaggatcgtggtctatacggcagaatcttcccaagcctcaggaggaggagctctagatgttcccagatctgggaggtaaagtggaatggggggacatggtcagcgtaatggggttgggctggaagcaggttaaggagcaggcagatctctgaatcccctctctgactctgtgtccccaggcatctgcctgtcccccaccctggaagaggtctggcttgaccctttgtctggtgaatttcctgctctgctttcctggtcctgctggccggatcagtggaggccactcacttcaccccacagggatgttctgtgttgccctacacctgggaactggaggtactggaggcaggctgtggtgagcttgaaagcaaaacacagagggcagtccaatctctttggccatatttcttctgcatatccaataccatgtccacaactctgctagtgtcctgatggtggtgggctctacacattcccgggaagctgaaggcagataatgaccaggacaggtcaacctctcttcttctgaaagccttcatctactaatggcctgggactcttcccttaaatgcttagattgtgtcttccactaaggttttttgctgttgctgttgtttgtttgtttgtttgtttgtttgtttgtttgttttgagacggaatctcactctgtcgcccaggctggagtgtagtggcacaatctcagctcaccacaaccttcacctcctaggttgaaggggttctcctgcctcagcctcctgtgtagctaggattacaggcacatgccaccatgcctggctaatttttgtatttttggtagagacaggatttcgccatgttggccaggctggtcttgaactcctgacctcaggtgatctgcctaccttggtctcccaaagtgctgggattacaggtgtgagccaccacacccggccaaggtttttgtttgtttgtttgtttgtttgtttgttttgtattgaggcagggtatcactctggtcacccaggctggagtgcagtagtgcaatcacggctcactgaaacctccacctccctggcgggctcaggtgatcctgccacctcagcttcccaggtagctgggactacaggcttgtaccaccactcccagctaatttttgcgtttttagtagagacagggtttccccatgttgcccaggttggtctcaaactctgggctcaagcgatctgcctgcctcagcctcccaaagtgctgggattacaggtgtaagccaccgtacccggccccgccactaaggttttgaaaatgaagcaattacaagtttaagtctattaataagtgatgaagccatgtagaaaagcagaataattatcttggatcaggaaggtcacatgaggatctacttgggggttgtcaatattctatttcttgacctgatcagtgttgacagcaggttttaattttttacttctttttgtttgtttgtttttgagacggagtcttgctctgtctcccaggctggagtgcagtggtatgatctcggctcactgcaacctccgcctcctgggttcaagctgttctcctgcctcagcctccccagtagctgggattacaggcaggcaccaccacgaccagctaatttttgtatttttagtagagactgggtttcaccatcttggccaggctggtctcgaacttctgatctcgtgatccgccctccttggcctcccaaagtgctgggattacaggcttgagccagcgtgcccggcccattttttacttccttattaaactgtacatataggccttgcacacttttctgcatcaatgttatattccacaataaagggaaaaggtatatacacaacttgataccagtaatgtgaaacatatatttctacatagaaaaaaaaatgactgaaatactgcactccaatgtgttcacacagtagttgtttctggattatttatatattaaatgtttatatattgtattatgccatgaggtttgtgttttctctccacttttctgcattttccaagtttactacaaagagcacatattactcttataatcagaaagtcataaaatatatttaaaaagacaaaattgaaactaataaggatcaacacaaaacagatgagccatctgtggaaatccgcacagaatactacctaaagagattggtgacgtgcatgatctcactaggatgagcacaaagcttgccagagcctagggtctatttctagggttggctcttggaagccaggatagttgttatctctgggaagagggaggggcacacaaggggcttctaaaacattctgaatgttctatttctgaacctggttggtgggtacatgactgttggttttattattatatgttttatatactcttccgtatgtatggtgtggattccaaaaaaagatttcctttagagaaaaccagaatcacataagtagaaaatatggtgctatgttgaaggaacaactcaagtttatataaaatcatcatcatttataggcttaaaaagttgctttggaattttggtctaactgacttgtcttttctgcagcaaaccacgctccttctggacgtgctccaggcagaggggattagggtgggttcaaggctgcaagtacctagctcagcacactctcttcaggggacttagagtttgtctggtgttggctctctgagctcttgtcaggaatgccgacccttccgaggttcaggatttgaagcctgccttcccaccccagatttggtccacacagacactcaagtatgtatttcaactacaaatgacctgtactttcctattactcctctctttcatggtaacctttctggtatccttccttccctacatttatgggagggggacatcattctctgctctcctgtcactgaaggctccaccttctgtcttcttctgacccatctggttttcctggggccacctcctctccttaccaccctaacgcttttgtaacttgaggagaaatgagagatcacctagtcaggtcatcattctctgtagatgaagaggcccaatggtttgctcaagaattgccaagcgagttaaagacagagagtatgagagtcagcaagacctacagaaagcatctatctgcactgttttgcagggacttagcctttgtgtgtggactcctggaatgccacccactaagaaacattgtctgacaccaactccccacttggtaggtggggacactgaaactcatggcaggaaagggccttgccccaagccagggcagagtgtcactcatcactctcaattttcagtccagggcaccttgttgtgactatcccaaaggcagccactttccctggtctgaaagacctgaagagagaagagaagagaaggatggaaggcagagtatgcggctttgattcatttcctggtgaaaacagatctatacgagaagcaaatttcacgaaagggaagagaagaaagtgtcccatacgttgctggcctgtttcaaccttgctttgattcttgctgaaaagggtaccgtgtatttctgagttcaacatgcagaccagtgttaggaaagccactgcacctccactttagcctccagggctgtgccctgcaaatggcctgcagccttggtgcctcgctctccagactgcattttggaagatgggacagaggcttatggaagcccacattagaacgggggagcagaatgggtgagatgagggatccttgatagtgaaccagatgaaggaatggtagccaaatgccaggcctcctttgtggcttcaatccaaaggctctggagcccttccagggcagaacatcaggcatgtttacccccactgtcctcaacagtgacagaggtgcaatcttgggcagctggccattttgaaagcaacctccttaatctcaactgggaaggctccctagcaggacccctgtgttgcacacctggaggaagctagactaaccagaagctcagcacggttccatctgggatgcccaggtctgagacgaaaaaggtaactctcttttctgggtcctggcccagttgtgtctctctccacctcattctctgagatgcctgtctccccttttttgtcccatcaggaggcaagagctatcactgggccagactccaccagaagccaagccagcttgttacccagcttctcagggagcaaagaacagccttgtttctatcttatccccactgtcccctgcccctgccccacctcccagccattcagcttctggcttccccagagctgcctgcttctttgtggtcctccattccttgaaaagaccttctagtcattagtgtatataaatggccacttagcccagattacagtgaggtcaacagctggggctctgagaattgtcacacactggcacaggagaggaggctattcttccagagaatttggagggcactcccatccacttacaacaaaaagcccatccactgtgcttggcagtaggtgatctgagaaccaatggaaccaggttaatcctgtggcactgttgagtgaggagagcagtggcgggcactggaaaatatcagagacaaggcaggagacctgaaatctaggcttagctcctcatatacttggcagctgtatgacctcagacaaccagtgttacctctctaagcctcagtttcctcatgcaaaaggagggggaataacaacagagcccactgcttgggggtgttgtgaggacaggatgaaaaaacaaacagaaatccctcagtacaggattcagtgcagtggacagtcttgcaaggtctggttcagccctccacccctaccctcaccagtataaagaactctggcctacaagtcagatgacctgagttttaatctcagctttgccattagccgtgtgaacttgagaaagtccctttcctttttacatctattgggatgatcatgcattttttgtcctttattctgttaatatagtgtgttacattgattgcttttcatagactgaaccagccttgtattccagggataaatctcacttggtcatggtgtataatcctttatacaaatgttgctgggttgagtttgctagtattttgttgaagatttttatgtcttgattcataaggaatattggtgtaccttccccttttatggccacagtttccctacaatgatgtagtcgaactagacaacctccaatatctttcagtattcatgtcctctgattctgtgaaactaagaaaattaagaaatagtgattcataggcacaaggcaggcaaaacttagactccttgtagaataattaggaagccaaatattcagtgtgcttatttctcaaataaccttagtttctccagtctgccccaactccgaggcctgaatatctctagatgcttatgatggcaactaaagcctaaaagctaattcattttaaagttcttccaaatgcatagggttttatttttccagacctgggttcagatggggaatttgacaaacaatggaaagggggaaaaacaacaatctaaacactgagtgacaaagtaacaaagaaatagtctagctatcagccagtcaagccagccttggctttgctatccaaagtagtcagtctaattctaccaccagtttctgttcctgtagctgtctactgcctgccagggactctgccttcccacccacaactaccaatggaaggatgtggtgaccataccagtggctgctgacatctcctgccatgggaagcataattgcctccagcagcctcccccttagatccatcatttttgttgcacttggcctgggctgtactcccggccaatgactgaacatggtgagcatagtaatgcaggcccatttctgtgaggagcaggactcctccagtaggtgactttggctcaaggactctctattggcctggttgaacttttcctgaactgtgctactgtctgagactcttcttacccaatcctctttctcgccccaattgtcacagaccacctgcattgtggtctgagtctctccccaccttctcttgctcttccctgtttatctttcacaggcatttcccccagtacattccttgaatgtctaacccgatacgggtgcctgacttttggcagacctaagcagacaaaaaggagtacttggttacctagctcttctttctaccacaaacatcgagggaaccctttttccctcacccctctgccacacccccactgccccagtgaacaaccacagagagagctgtggtataatattaggctggtgcaaaagtaattgcggtttttgccattacttttaatggtaaaaaccgcaattacttttgcacctacctagtatttgtgtccccccaaattcatatgttgaaacctaacccacaatatgatgtcattaggaggcaagaccttgaggaggtgattagatgatggggtggagctctcctgaatgagattagtgcccttataagaagaagcccaaggaagctaccttgactcttccatcacatgagaatgcagcaagaaggcaccatctactaatcaggaagagagctctcaccagacactgaatctgccagtgtcttgatcttgaagttcccagcctccagaactatgcataatgcatttccattgtctctaagccacccagcctatggtattttgtcatagcagcctgaactgactaagacagtgagccacatgagaagtgccccaacccctcccttaagcacttggctcacagatcagtgggttcatttctgcctgagttttattgttattctgtagatttcttgggctagatatatttttctgttattttccttcttcacctcagtcatgaattggttgttttaaaaaagacaatgtaagtcatggggaaactcctgacaactctactctcctagggttcctgataaaaggggattcagttgagtcctctgatggtctctacctgccaaagtccagcagcccttagcaaacatgctgctcgtttctgtagagaaggtgctggtgtcccaccatacttctctctccctcatgaagggcttgcgacccagcaaatgggtggcttatatgggtctgtttcaaaggaagagccagctctgggaagaaaaacgatgagcataagcataacctaccactgtgcctgggaaagcagacaacttttttgatgtgtgaatatctaatgagaatggaatccatcaattaccttaaacttaggcacagtcttcaaattcaatatatgtgggatatacttttagtcagtttgtagacgttatttgtaataaataatctggcttctctaaagaaattattttaagtgtttggtttggtttgatttaatggtaaaattatatttagtggcagagaattatagcaatggtgataaactatagagtgtcataagttcatatcttattctcacatttgaagctgcctgcagatgcattcaagatgcagccagaagtcaggagactcaggctgttatttggagctcatcattttacagccttgctggactcccactttctcaggggaaaaatgtggtgttgacccagattagctctccaggccctgctgagttgggcactctgtaagctggagggtcttctattgtcttcacctaagtgtcaatcaacaacccaaatgggcatgggggaagagggagctgggccaatgcccagggtgcctggtagagagataccttgggcactggaaggcaccagcttcccagagagaagggggagggccatgaaaaagttggctgtagatgccagggacactgggactctccagctgtgtgtttgtgtcttctgaagacttatgtttcattcctttggagcatgcataatcatacactgtgggatgtgttatatagattgcttgatagttcaccactgtaataaaatactgtgactggaatctgctcccagtctgcctttgatagcacttgtgcaacacacatttactgagcatttacagtgatccaggacctgtgttgtgaaaacattgatggacaaggcagatggtggagcacgtcagtgaggatttttaacaaaggctggtaagtgctataaaggaacattgtaggacactagagaacaaagaacaggagaacctgacttaggctggggtggggcgttggttagaggaggctccttggaggacatgaggtttaagctgtgacctgaggatgaatagatgttggccaggtgaggtaccggtatttgtcagccttaccagtaaaaaagaaaacctattaaaaaaaaaatacacatacaaagcctcatcagccatggcttaccagagaaagtacagcgggcacacaaaccacaagctctaaagtcactctccaacctctccacaatatatatacacaagccctaaactgacgtaatgggactaaagtgtaaaaaatcccgccaaacccaacacacaccccgaaactgcgtcaccagggaaaagtacagtttcacttccgcaatcccaacaagcgtcacttcctctttctcacggtacgtcacatcccattaacttacaacgtcattttcccacggccgcgccgccccttttaaccgttaaccccacagccaatcaccacacggcccacactttttaaaatcacctcatttacatattggcaccattccatctataaggtatattattgatgatg

SEQ ID NO: 305 - DNA, 29996 bp, Artificial Sequence
  HDAd35-T4-Ef1a-mgmt-GFP
  misc_feature (1)..(481): Ad35 5'end
  misc_feature (14126)..(14159): FRT (Complementary)
  misc_feature (14220)..(14463): pT4 LIR
  misc_feature (14478)..(15812): Ef1a promoter
  misc_feature (15830)..(16450): mgmt
  misc_feature (16451)..(16522): 2A
  misc_feature (16523)..(17242): GFP
  misc_feature (17269)..(17390): SV40pA
  misc_feature (17501)..(17766): pT4 RIR
  misc_feature (17873)..(17906): FRT (Complementary)
  misc_feature (29589)..(29996): Ad35 3'end
catcatcaataatataccttatagatggaatggtgccaatatgtaaatgaggtgattttaaaaagtgtgggccgtgtggtgattggctgtggggttaacggttaaaaggggcggcgcggccgtgggaaaatgacgttttatgggggtggagtttttttgcaagttgtcgcgggaaatgttacgcataaaaaggcttcttttctcacggaactacttagttttcccacggtatttaacaggaaatgaggtagttttgaccggatgcaagtgaaaattgctgattttcgcgcgaaaactgaatgaggaagtgtttttctgaataatgtggtatttatggcagggtggagtatttgttcagggccaggtagactttgacccattacgtggaggtttcgattaccgtgttttttacctgaatttccgcgtaccgtgtcaaagtcttctgtttttacgtaggtgtcagctgatcgctagggtatttaccggtattcaaggattacatgagcttagaaatgtaattagcatagtgtgtggcatagtgtagataccaaataaatatgatctctccttctactcttgaaaatgcaaacacattcttggtggtcctaaaatagcctgtaacatggtttactcagcagcatttgctattcaaggcagatctgcctttagtcattggctgcgctcctgaacagctgtgtgaaaggctaacttttgtaaaccaaatcaaaataaaatgcagcaaaaatttgtcactgaaaggaaatcctcagtatatccttttatgaaatgaaagatccctcatccaaacttaacttttttaaaagtgcgcatttggagatatagccctttcttatgaatcctaattcaattttggccataaacacacgttgatgttccccaccccaaagcacatagcaacaagagtaggttctatattgaaaataatgacaatttaaaaacatgtacttatttcactgtatgtggacagtgtctatgattgcatcatgaagtgtcatataaccatgtacgtgtacatgagagagagatagagagagaagtggtagggtggtggtggtagaggggatggcgatagtaatcatggtaatggtagaggtgatggaggtggtaatgacggaggtaagggtggtagtgatgatggtggtggtggtaatggtggtggatgtggtggtggcaattgggatggtgggatggtggtagccatggtgatggtggtaatggtgttgatttaaagggtggtggtagtgaaggtgagggtagtggtggtggaggtggtggtgctggtagcaatagtgatggtggtgatggtgttgatgagggtgttgggatcagggtgagttcccacagtatatttcattcttgttgtaccactctgtcaacagcaccactgactgggacagaggaagaaggcacactctgaatgtgttattaacagaaacctcaaaacagtctgtctccttgtagtcattcaaaattatctttttcttacctggaaaactgaaactgaattaccgggaaaaacacaggagatttttgtttgttaatatgctgccaataaagtaattttatgtcaaatttaactacaggaaagggcaaggcattttctaagttccttagatgtcatgtggctaaaaaaaacaaaaggatggacagcagttagatactgtacacttagctgtttgaagccatatattcagaaagcagatgttgggagttggtgtttgaggactgatttcctggaggtattttatataggccaagttcattgttctaaactctaagggcttgacttgagggaggaaaagaggcaagaacatgtttagttttgctgacagcatcacatgggcagccctaaggctagacaactttagggcctgaagcttattctaggaaagaagcacctacagagtggcactgggctcccctccactatagagatgaagtcatatgacagtaaagggcaggcagggctgcctagggggcccagaactgacacttccattagaatgagcacaggccagggagagaagtggggaaccagagagaaggagctggaattctagtaggacaaacggtaagtgaacaacaagaacaagttaagagtgtgtgcagtattctttcaaagactgaaaaaatagtgatgtgatagaatggcaggtggctctgagcaggccaggagaaggactgggggcagagcatcccaggcaggagggcagcaagtgggaaggccctggggtggggcttttggactgttccagtgacgggcaggcagccagtgtgcctgtcacacaatgcaccagggaagtagtcgtgaatttgcagagggtcttgcaggctatgggaaagggattggattgtattttgtttgtagggaagccatcgggggacttaagcagaggaaggattggcttcatctctttgaaaaagttctctctggatgctgatgggaggagaaatggaaggaaaagaaacacttttaggggcaagaacttttgagaagggtggaattgggagtgtggagttggggccagctttggcacaggaggggaagctaaacacgtggccgcatgagggcctgtaattctacctgaaatgggtaccatttgttagggtaaacaaatgaaccaaatgcccagtgatacagaccaagtgttggcaaacttcttctgtgatggcccaggtagtaaatgtctcaggcttcgcaggccatgtggtctctgttgaagctctgtgtagtagacaatatgttaatgactgggcgtgactgtgtgctaataaaagtttatttacaaaaacagcccgtgggctggatttagctcacaggctgtagtttgccaacctctgacctagagcatgaactgagcatcttcttggagggaaataagttctttccaagttgccctcctcacattgcagggggccatgtaggcccattattcacagaagagtgggtgggcaacctttctggagcagaaaaacgtaaagatttcttccgtagtgcaagtaaggtgaccatttctaaaccgtgcaagtgatccagcagtcccaaaagttgtttcacttctcattgtgcgcccgttctcaggtgctccgaagcttccagtcctttgtagggacatggatgaaattggaaatcatcattctcagtaaactatcgcaagaacaaaaaaccaaacaccgcatattctcactcataggtgggaattgaacaatgagatcacatggacacgggaaggggaacatcacattctggggactgttgtggggtggggggaggggggagggatagcattgggagatatacctaatgctagatgacaagttagtgggtgcagcgcaccagtgtggcacatgtatacatatgtaactaacctgcacaatgtgcacatgtaccctaaaacttaaagtataataataaaagaaaaaaaaaaagagaggagagaaacatcatcccctccaggatacccttgggccttgttcttatagtcttgtacattgttgaacaatttgcatgggctagtggattaaagcacaccctccaccctcaggccctcaagggtctctatgataatacagtctcaccttctaccctttccatcaccatcctaggtgctatggccaaccttgaggctgccatgttaggtctatgcatttcccacctccaccacataactctctgaaggccaggtagtttcctattcatcttggtaaccccaaagcctcgtgacagggctcagctggcatctgcggatgtgaatgaaccattggagaaaatggtactctgcaaataactctgttattttcccatttcctgtgtaaggcctagagacaatgactttttaattgcaccccttcccctctgtatgacactggccttctcttgtgtccagcaatgtgggtggcctagatgatttctaagggacttctggccaagatgaacagcagctgcatcttactgagcatttactatgtgccatatactcagccacagctctaggggcatagaagcaggagctctcagggtcagggcagtgagtgagcaagcgagcacctatgccagccctgcctctggatggggacttgagagggtgatggaagcctgcagcactggagggaggcagacaaagacaggcctgtgctgagggggcccggagcaagagagagggaggcaatgacagcagagacatgcctgcgccttgggtttgagtgcccagtggtcaaatccacttccctgtggctgatgcttgcctttctaactttggaatttaggggttggagatctggtgagaaggtaggagggagatgaggaggagaagggaaaggcaggaaggaaggggagggaaaggaaaagcaaaaggggaggaggaaggtttccaacaaattattctatatcaactgcggaaatcaaaatttgttgcccaaatcttagaagctcatgtccctcctccccagaagtctggaatgcagcactccaggggtagcttataacccaaatatctatctgtaaaaagagaaacattgggctttcgagctgtggattctcagtaaaagcaagaggcctcagcctacacaggccagcccagagtttgaggaaccccaggcccacacccacagggctggcccctgggtctgcatactccctagaaatgtgcacacttctgagcctcaactctgtcctggagtctaacagcatccctctccttcctggggcagttccacctccagaaacctgttaccttgggccttatgtcaaggaaactgtgggaaagagctaggcaggaatgcagatgaggccagcatgggctcctaaaagtttagaaataggcagtgtcatgctcccaggtgcctgcataaaccagctgaaaaatggagctcccctcaccagcactctcccttcaaacagactgtgatttgcaggtcactggtttaccaagccaggctacccaggcaggacccagatgccaagcccagtggtgtcctgcaagctgagcagtgctcagttcttgcaaaaaaaggtctgtgtgaaggcaaggcctctgcctggcttctcaccccagttgggtgtctggaacaggaaggagcccttactgcagaaaaaggaggagggagcaaagggagcgaacagctgcgtgctccatggggaggatccccaaagtagaaaggcgcatacacactgcagcccttgacccagaatgctcacagctacattacagattcaggtctcctcagtgtagtggggctgctgatgagactgtggcatcctcaggggtcaggacacacattttccatcactcttctgatggcaaaaaacctctgagccaatgccaacctctgatcattaaaaaaaagtgctcacagcagtgtgtggtttaggatcatgccctgtgtggtttggaacacgtgcacaaccacaccttgttcatcaccatcccagaaaccctgacgcaggcaaagagcagagttattaaccctactttactgatgtggatactgaggcccagaggctcatgcaagttatcaataagtggcagggacagttgcctctagattaactagcccctaggatcacctgggtcttggaaggggacccataaacatgagctcccctctcttggggccagatttgcacctgtgccgcgccttcagcctgcatgaagtaggggctgctggcaaagactcaaagctgtaaatctgggttttctcttgaggcttctaagggagctgtttcgacaactcactctgttcccagctggctgcccctgcatagggttttaaagcagcctagctttctgccaggcttggcagtggacaacgctggtcagaacatcccagagagctaccagaatgaagtaagtttgcttctactctttacctgtttatgggctgtctctgccactggaatgaaaggcactgagaacagtgcctggcctgcagaaggccctggaaatacctgagctcctaatctgggaataggagtaggaagagctttggaggcagggcacctgagtttgagatctacaacttcctgcctgtgtgacattgggaaagtctccatcctttctgagcctcagtctccaccctggggaagtggaaatatcaatctctgtgacacagaagcaaatgagcgaatgtgcacaaagtaccttgcacaagagagacgctcaaacacttgcctccaggtttcaccgagaactacagagtaagatagatttgttcccagtggaggaagcctgggaataatttgcccctagactatgaattcctggggctcaagatcgagcacagggccaggcacacagaagggaccctggaaatgtggcaggaggccagagatagacaggcccttagagctcatacccatgccctctgacctcaagaagaaagaaacctgctcaaaatctcacaaagagcttgttccaaccctgaatcgagtctgaggactccttcctgagtccagcactttttctgcaagaagtatatgcctccaaagctgatgggcgcaaatcttgaaccccgtcacataaacacaaagggaggaggtgactagagctcctcctactggatatgtctaaggtcaccagtctaaagaaaagggatggatagaatgaggccagtatttttgcagccatccaaatgtccacatacgctgttacactgagggctcctctctcccccgtcttcagccctacttgcatttagaggtgagaaagatatgggctgaggggttgtttttcatcgtattgtagatggaaagcacactgcccttggggccatccaaatgtggaccttgatgtagcaccccaccttctggatggccatccttctgaaagtcactgaatttctcagactttattctctttatccataaagaaggagaataataataatccccccaccctgcccaaccactgactggttgggaagctcagaagaaatactgggcacggcatcccattgtaatctatagagtgagtcgcttcttaatattaaatggctgaacacagaagatgtgcaaaaagtactgtgtccccttcctcctccaactgaacatttcatgccctttgcaccctcattttgtctaggagctgccttatgaagggaataggtacctgctccgagctggaggaatctttgccacttatggtggggtatggactgagacagagatggcatgtgacatgcgcactgagtctcaactccatgcaggctctggagcactctcaaattggagtactaatgccttttaaattctcacactagcaatcctttgacctactgatctagggatctagggaaagaatcgtgatcttaacttcaaagggaaggacaaaatgttctgcctcctgttaaaactccatacactaagtgcagagactggatgccttattaaccttgggtagatgcccaaatgttcaaaaggtcaaactcttctgttccccagatcgccagagtcattaaccagtcacactattaaatgaatgaacagatgctgaaaaggtacttgcattactgagatttcttatggtgatggcccctgcctgatatgtattcagcattttgtagttttcaatgtgcattagagtatagtggtgatgacattggcctctgagtttgccacttcttatatctgtgactttggtcaaattgcttaatctctctgagtctcggtttcctggagataataatagcttcttcttcccagggttatcatgaggattacaggagataatgccccaaaaatgcttagtaaagtgcctagcacctagtcaatgctgaattaaaggtggttattcttacttttcgttcatttgaactttgttctcagggagggcaaaggatagacaaagccccatagctagtgaggagtagctgcaagactagaacccaggtgttctgagccctagtcttaggccaagaacaactgttacgtgagatgcacgttttccttcaagggagctcacaattatttccatgtaaattcaaggactgctaaaagagaactctcctctgggactgatatcattttatttcaagattgatttgaaacatgttttttgtttgtttgtttgttttctaggaaagaacaagagaaccagttaagctgaatgcctgaagcaaatccctgttagcgatgttttcaggatgagggagagtggtgcaagaaacgtgcttccagatgcacatggtttcctgggactagggttcagggtgtcatccctgggtgttattaagtgtcagaaggagagcaaacaagggaaacatctgagatccagctaaggctacaccctggaaatgcaagcccagctcttgcaaaggacctcctttggccactcaccttccaggccttacaataacttgtttggactgcaggtttcttggtggactcacaggccattctgcttttatttggtcaacctcagttcacaagcacccagatgctgagatcctcagcatgtgcagcagagtttcatattagcactgggtacctttctgaggctacagggataccgtacagcagcacctgtcacgtccagccaaaggagtgggctctctcaatgtcatccaatgctgtttcaactgtgaagaagaccatctgagagagttgcttttggaggctgaggcaaatttttaaaattctttgttctcctcaactggggtgaattcttggtcttctaggacagcttgaagttttagaaagagtcaagccactcagaaccaacagagaactctttcagagaacaaggtgtggcatagaggaggcagagggctgatcttgatcaaatccaaagtgtgactctaaagcaatgaatgtgaatttttggcaaagcttacaaagggctctaaaggccatctgcaaagagaagccaagcctgatcgatgaatcactagtgcggccggatatcgatcggcacgctgttgattttctcatagtaaggaacagtgggccctttcagtcccacttctgtagtctgtggtactacaaatggtgagcccatgatgttgccattcatagggttattctccagcagtaatgactggccagccactcccatagccgcggggctaggatttattgtcaatggagggacctgcagttctgcacaagcagtactaggatgagcacctgggcccattgcaagggtgacatcttcaaggcaaggcctcttaattttattagggtagcccccatcagccatgtctggaaactggaagtggtcttcttcttgtctcctcttaacagttccctgtgaatggaagagaagagaggaggagaagagaggagaggagaagggaagagaggtgacacacacacacacacacacacacacacacacagagagagagagagagagacagagagaaagagagagagagagagagaggaatttttataaaggtttggcacattaaagctaatgaacaggaaatgtgcatgataaaacagacctctcagtttaaagacttatagttgtgaaaactataaaatacagcctgtctttggaaccatagtgcttatttattcattattatgtttcatctaaactgtctaattacatttcaaataaggcattatgttgtctgtatactaaaacgggatagaacgttattcaaagggtaatctgcccacttcaaggagagttcaacaaaactatgcagaagtcactaaatgaaccatgctgccaaaggcaggcattggagagaaaactagaagtagctaaatagttttaattctttcctgtctacagacacatagattttaacgaaggaataccatagtatagaattgaacttttaggctgccttctagtcttggttaaatgcatcaggctgcagtggtaaaattgaatacaacagagcccttacaggaaagaagtagatctggatgtgttttcttggggagctgtttaaaatactgtttttgggaaagcacaagtttcagaacagtcattgtaggcatcgtattcattgttccatttatttttacacacacacacacacacacacacacacacactctcacacattgctatgtgtacacaaaaataatttggaagaacctatacccaacaatttggagtggtcatttatttgggatgactggcaattccctttctattctcttcatttctgcttgtttgtctttaacgagaacgactcataatccaaaaatttaaaaaagtataaagttatctaaataagaaattttcctctgaagatgcatcctcaggttggggagatattaaacaatgagaaaaggccccaatctgggatctgaaccttgggggagctgcccatcatttatagaagcacagcctttgggaacaaagcaaagtcactagcaatgtgagacttcctactcttcatggcttcatacagtcatccatcgctgttgtgttaatgaccatgacctgtatgttagcaggtaaatgggaaaggaagtgggggcaaaggagtatgtgcaggaatgatcaaaataaggaaaggaagagagggatctggaaatcacctgaatgccgataggtgaacaggtagaattcttttaaagcttcccccacccggtaccccccaaataacccctttccagctttggaagtttcactaggacatacagtgctcatcctctgatgtcaccttaagtttggctcttctggtttgatgagcttgtagcccactaggagctcaaggcatgcatggggccacttgccagcacgatgaggggcatgactgtcatggccaagtgaacatcaaagcagatccccagggctgtatgtctcaggccttggtgcacatcagaatcacttagaaacatccacattcctgggccctcccaccacaaactgacagcttcatccagggtgtggcccaggcatcgggagtttttccaacagctccatggctgattctcaacagaaaaccactggcccagagcaagggtggaggcagcgtggcatagggctctgaccttggccttgccactgaacctctcagagccccagtttctttatgtgtaaaatgagtgtaattatagttcttttctcatgaaggtgctctgactattaagtgaaacggggcacattgtatgacacctaatagctcctcactaactggtacccggcattataaagggcaggtatggaagggttctgggagtccaatacccttcttaaagacagagaggtctctgagacccagagaggggcaggccttacccagagttgctcagccagagggcaacaaggcccaggtcagatgcagggcccctccaccaccactcagctgcctccagacccactgccttcgccatgttgttggtaggacactgcatcgcccccacagaaggggcttgccaacttgagtgagaggacttgcacacttctttgacttttcttttgagatgcccacaatctgaacaagggcacttcaagggacagctctgtcaccaaactcatctgaggcctgaataccatgggtcaggcaggaatgggttggagaggtgtagagcaggcacaataagagggctgaggcccatgcagtcatcagtgcccactttcccaggagtctgactgggcacagcacccatagtgtccctgagctggtccatggagcagctcactaactgtttggcccacagcaggtgctcagtaaatggcagttgaacgaatcaatggacaaaggaacataaattacccaacacacagggagctcagccatttactcaatccattatggagtaacctacaaacaagccactgggtcccaaactgaaattgtgtctcttctacattctcccaaagaatccaataggttaaaaatagaaatgtatgaaatagatcaatcagggatgattgcatgtggatttgacataaggatcccctgcagggagtctgagctggcaacagtcaggcccaaagtgctgtccatgatgtctcgaactgcaagacagttttaacaatggcgaagcaatgcagaaccaggcaggccaaggagggggtgggggttggggaaaggaagggagggaaggggctgtgaggggcaatggtctggcatccctgccacgtgagcctctgaaatttgctggcagcttctatgggctcccagagctttcacttaattgttggtctgccactaacctgctgggagtaaggtgcagggatggaggaggcagggcatgaccaccagacactaaaggtaccagctggggccactggcaaagggaaggaggctgcacctctcctacatgagagcccgtatacacacaccttttccagcactcatcaactgcatcccaagcaaatggtccctgatcaattccaattctagaaaccaactgactactcaataacaaagtagatcccagcaggccgccactgctggagcggatgccacttttgctatgccaagtctgtggctggacagctgctggcatgtacactcactgactttcataaggatgcctaataaagggggcaggctcacctggcttttctcaggggtggggtttggggtgccgatagaggctgctgttttggcagagtggcaagctgcaagcctcttctgagctttcatttttcaatggacttcagtgagaattcactttgtcagaggccatgcagctccatgttttggatttcatggaatgagctttcaacagtgagcctgaagtgccctggctgaacagcaagaacaccagccaaccctaaacaaggccgaggagaggcggctgtgtttacacggaaggctcagccttgctgtaatagcgtctgccttcaccagacatcagtgaggcgtggaaatctattatccagttaattttgcccctagataaagacttgctttcgtgtcttctctttcacagtcccatgatctgttactcatctcaactgcgagaagttggctgggctttcccctgtgcccagtgccacactcgtgccttcactgggtcacctgtgcctgtggctgatgccgctgaggttttgcctgcccagactgggtgtttctgactaaatcccacagccaccattttagatcaagggcaggagatagctcactgctccggaatgacctcccctcccagaatcctggtaggggcggaaggtccccaaccaagctcccagccctttctaaatgaatctccctgcttcacccatgtgcttttctccagtctctgcggtcttgatgacagcagggtattagtcctagctgtcccacagctcctacttctttcaggcctctccctgtgacaatcagtagccactggcaggatttcctcagagcatatctcgatttgctttcagacaattagttaaaaggacactggaccccagacgtcccaactcccagccagagccctcacaggcccggcctttggtggtgaggaagggggagggagtgagtgacagtgccctggcatcttttagaaacgaattcctttctctccatacataaatgcctgcagagtcccatttcagaatccggcagacaaagccaccaatgtgatccccatgaccttataaacattcattaaaatgcatttcaaggcatgtgatggcctccccaccccctagataatgagaaaacaaaggtttctcttctgatagagacaagttcagctctgaagtcaacattatttctggttctgtctgaacaatgacatatggcaactcttccctttctatagttctagtccagaatgacaaaaaaggggaaaaatttcttagagaaggtagagattatacgaatacagtccatgaaatgagcataaggagaataaagaatataacttatccaaagaagtctggcaggctgttataaatgcttgattttggacactgtagttggaggtttaacatggacaccaataaaaaggtcagcaaagggtatgcactgttcctattgggcaagaagataggaggtcaaaggtaaccaggaaagataaactcagggagacttattttccctccagagggcactgggcttgtaggccctgggcaaaattgtcaaaaaggtgaaaatcgcctgtggtttatttagtctgctctttcttcactagtgcctcaccagttcagttcaggccaatttgctagaaggtagcgaacgatcgaccggtgaagttcctatactttctagagaataggaacttcggaataggaacttctacctagatgcatgctcagagcggcccctagctagcgtttaaaacctacagttgaagtcggaagtttacatacacttaagttggagtcattaaaactcgtttttcaactactccacaaatttcttgttaacaaacaatagttttggcaagtcagttaggacatctactttgtgcatgacacaagtcatttttccaacaattgtttacagacagattatttcacttataattcactgtatcacaattccagtgggtcagaagtgtacatacacgcgcttgactgtgcctttaagcttttaattaagagtaattcatacaaaaggactcgcccctgccttggggaatcccagggaccgtcgttaaactcccactaacgtagaacccagagatcgctgcgttcccgccccctcacccgcccgctctcgtcatcactgaggtggagaagagcatgcgtgaggctccggtgcccgtcagtgggcagagcgcacatcgcccacagtccccgagaagttggggggaggggtcggcaattgaaccggtgcctagagaaggtggcgcggggtaaactgggaaagtgatgtcgtgtactggctccgcctttttcccgagggtgggggagaaccgtatataagtgcagtagtcgccgtgaacgttctttttcgcaacgggtttgccgccagaacacaggtaagtgccgtgtgtggttcccgcgggcctggcctctttacgggttatggcccttgcgtgccttgaattacttccacgcccctggctgcagtacgtgattcttgatcccgagcttcgggttggaagtgggtgggagagttcgaggccttgcgcttaaggagccccttcgcctcgtgcttgagttgaggcctggcctgggcgctggggccgccgcgtgcgaatctggtggcaccttcgcgcctgtctcgctgctttcgataagtctctagccatttaaaatttttgatgacctgctgcgacgctttttttctggcaagatagtcttgtaaatgcgggccaagatctgcacactggtatttcggtttttggggccgcgggcggcgacggggcccgtgcgtcccagcgcacatgttcggcgaggcggggcctgcgagcgcggccaccgagaatcggacgggggtagtctcaagctcgccggcctgctctggtgcctggcctcgcgccgccgtgtatcgccccgccctgggcggcaaggctggcccggtcggcaccagttgcgtgagcggaaagatggccgcttcccggccctgctgcagggagctcaaaatggaggacgcggcgctcgggagagcgggcgggtgagtcacccacacaaaggaaaagggcctttccgtcctcagccgtcgcttcatgtgactccacggagtaccgggcgccgtccaggcacctcgattagttctcgagcttttggagtacgtcgtctttaggttggggggaggggttttatgcgatggagtttccccacactgagtgggtggagactgaagttaggccagcttggcacttgatgtaattctccttggaatttgccctttttgagtttggatcttggttcattctcaagcctcagacagtggttcaaagtttttttcttccatttcaggtgtcgtgagaattcgatatcccaccatggacaaggattgtgaaatgaaacgcaccacactggacagccctttggggaagctggagctgtctggttgtgagcagggtctgcacgaaataaagctcctgggcaaggggacgtctgcagctgatgccgtggaggtcccagcccccgctgcggttctcggaggtccggagcccctgatgcagtgcacagcctggctgaatgcctatttccaccagcccgaggctatcgaagagttccccgtgccagcgcttcaccatcccgttttccagcaagagtcgttcacgcgtcaggtgttatggaagctgcttaaggttgtgaaattcggagaagtgatttcttaccagcaattggccgccctggccggcaaccccaaagccgcgcgagcagtgggaggcgccatgagaggcaatcctgtcaagatcctcatcccgtgccacagagtggtctgcagcagcggagccgtgggcaactactccggagggctagccgtgaaggaatggcttctggcccatgaaggccaccggttggggaagccaggcttgggagggagctcaggtctggcaggggcctggctcaagggagcgggagctacctcgggctccccgcctgctggccgaaacctcgaggtgaaacagactttgaattttgaccttctcaagttggcgggagacgtggagtccaacccagggcccatggtgagcaagggcgaggagctgttcaccggggtggtgcccatcctggtcgagctggacggcgacgtaaacggccacaagttcagcgtgtccggcgagggcgagggcgatgccacctacggcaagctgaccctgaagttcatctgcaccaccggcaagctgcccgtgccctggcccaccctcgtgaccaccctgacctacggcgtgcagtgcttcagccgctaccccgaccacatgaagcagcacgacttcttcaagtccgccatgcccgaaggctacgtccaggagcgcaccatcttcttcaaggacgacggcaactacaagacccgcgccgaggtgaagttcgagggcgacaccctggtgaaccgcatcgagctgaagggcatcgacttcaaggaggacggcaacatcctggggcacaagctggagtacaactacaacagccacaacgtctatatcatggccgacaagcagaagaacggcatcaaggtgaacttcaagatccgccacaacatcgaggacggcagcgtgcagctcgccgaccactaccagcagaacacccccatcggcgacggccccgtgctgctgcccgacaaccactacctgagcacccagtccgccctgagcaaagaccccaacgagaagcgcgatcacatggtcctgctggagttcgtgaccgccgccgggatcactctcggcatggacgagctgtacaagtaaagcggccgctcttcgagcagatatcataagatacattgatgagtttggacaaaccacaactagaatgcagtgaaaaaaatgctttatttgtgaaatttgtgatgctattgctttatttgtaaccattataagctgcaataaacaagttacgttaacaacaacaattgcattcattttatgtttcaggttcagggggaggtgtgggaggttttttaaagcaagtaaaacctctacaaatgtggtattaattaaagatctttaaacaatttaaaggcaatgctaccaaatactaagcgcgtgtatgtacacttctgacccactgggaatgtgatgaaagaaataaaagctgaaatgaatcattctctctactattattctgatatttcacattcttaaaataaagtggtgatcctaactgaccttaagacagggaatctttactcggattaaatgtcaggaattgtgaaaaagtgagtttaaatgtatttggctaaggtgtatgtaaacttccgacttcaactgtagtttaaaacgggcccgtagtctagggccgccagtgtgatggagttcggcttcaggtacagcacactggcggccgttactaggtagctagagccttcagactctagggaagttcctatactttctagagaataggaacttcggaataggaacttcacccatggcgatcgctagcctctaactcctagaccgtcagaactgctgggcccttcaagacgggctgctcacacccactcatgttaagcctggtgaggcctgtactctgttttcacaggaagaaatcctcacccagtcttccccaaacacattcccaggttgtgtcattagtgggatagagatgattattgtggggagaagagaaacatctggatggatttggtgaggttgatctatagaggaagtaggtgctgcctgaggtagctgtaatagaagctaaaggtcaaaggagagggccctgtcccaatccagatgactccacttctgctggacccaggttcacaagcttaatctacatttcacctaaatttggctaacaagcccaaaatcacacaggcaaagggagaagtggaggcagaaccgaggttggaggccaccagggccaccgggcagagatcatttaagcccaaccttctcacttctccctgggctctgcctctcttaaaggaccttgtggtgtgacctcttgtaggtccctttcacactcggggcctcagtttccccactgtaaagtgaatgggtcccagctttggtaagcttatgcttacctgatgctttcttcctgggctgctcttgtagagaaaagataaatcttcttcctccatccacgagggctcctttccctgggggtgagagtaggctgaggagagccacttgcacacacccttaaagaaagtattacctgcaccagctcagtgagaggcacagatcagactgttacttgaatcaaattatgagcctccccaaatatatctatgacatttaaataggggattacttgaacatagactgtgggatccggtgtggagtgcgggagactagcaaagtgaatcctgagagtagcaggtctgcacctgttggatcgagaaaggcggcctacaattctggtcaaatgagctgtgcttattgacatattctattagagagtactaccaggtcaccagtcaccagaaaggctgccagctctccaaccacctccagggaactatcctgaatggggccttaacaagtctaagagagggttggtttgggtcccaagccaatatttgctctgctttatgtcagtcatatggaacccaaaccaaccctctcctatgtgcctcaccagtcggtgcagggatcccaatttcaagtttggttttttatggtcaaagtccagcatagattaaatgaaggggtgtgatgatggtgttaaaagagaactccagaccagtttaactcttggacacacatcccatctcaccatggtgcttccaaccttccagagatgatgggctcctattttctgatgacaaagccctccacaggattgctgcctggccatcagggagtgcctctgtaactgaggctgagatcccactttcagtcctccagctgtggcccatccctgctccgcccaccgggtatggcctgtcctaggctcttaggtatggctgcattgtgaaatgatggctacagagctggcatctcctgtagtctggttcatctagtgcactacctcatagttaaaagaaatctgtttaagccactgagggtggctcctagtgccaactccaagaacaggaagcttcccttttttgggaggaggggcagatggtaacatggatcgtccaggtcaatgggagcagggcaaccacagtaagtactggacaacaacacaaaactccatgtgtggcttccatcgagtccctctccaattggtttggtcttctccgtcccatgcagcactttagcaaggggcctggctgaaggctatgaattgtgtggagcctcctcattgcagtctccaaccatctgatgctgggaaaatgtcaccaggatgcagccatgccgtgtggccaatgaaccgagaaaacaccccttttctagaatgctctaaagaggcagaataatccagaggtgaggaaggaaatactccaccagagacccaggcagttcctacaaaagccagactttccttcacctagggagtgacaagaccagtggaaaacactctcaagcagtaacccccaaatgctctgcaagccagtggcgtccagataccgcacaagcgagtgggctgtctaatcccatcatcatgatgtaaatatctctaggctgccctgggctgtgcctgaccctgtcttcagctttccacacctccacctacagcccatgcacagaaggaccacccaggaatgctgcaagtgtggcacctccagggccacccagggagaaggagggcagctatgctggtggctccaggcccatttggcgggtggtaccttcacaccacaaagcccaaactgaggccccagatttggctgatgagggcatattggacaggggtcacttatgctcttccccattgccacctggcctctggctacctggacttggctacctgtggatcctctcacaggtgccaccatcttggctgagtctccagatgcgaggtccctgaggcagtggcgggcttctcgctaatgctgatgggattaggaatgggataggtggggagggccctggactgggccctgatgagccaagtgggtttttagaggggctactggtacatttcagggacaggacatctggtagagctaagctggggcaataaggagccactgctaatctgagagctagaaacaatcagcttctgggtcattattaattagggtagtttgggctgtgtggaagtcacgtactatatggggtagccacagctctctctacagataatctctaagacttctgattgggactgtgtgaatgcagtagcaatatctcttcttactgccaggccctgccagtcctgcctccacgccctggctggccccccttatgatctgacccatgccaggctgccatagtatgttacttctgcattagcactccttgggacctgcctctccactgtccctcagactttaaagaactatacaaacccaaggggctcttcccaagagaattgatatgacttgaggtgattccatttctggaagtagtcactccattttctgcctcactctttcagtgcttcacagagcaggttcgaacgaaggagccatccaactaaccgtcatgttcgggcaaccgaagaagggagtggcaggatttcctttggagacttctggaattagacagcagtttaatgcaagcatctaaattctctccctcccagagtctcattaaaactacagtaagagtttgtgttttgttttgtttttaaagacaaaatcccaccaggatagagagaataggagaggagataacagcatcataatttatgaaactaaaatgcagatagaccaggattaactgactacacagcaccaaggaagctgaatcacaagacagcagaggagaaaactggaaaggatcgtggtctatacggcagaatcttcccaagcctcaggaggaggagctctagatgttcccagatctgggaggtaaagtggaatggggggacatggtcagcgtaatggggttgggctggaagcaggttaaggagcaggcagatctctgaatcccctctctgactctgtgtccccaggcatctgcctgtcccccaccctggaagaggtctggcttgaccctttgtctggtgaatttcctgctctgctttcctggtcctgctggccggatcagtggaggccactcacttcaccccacagggatgttctgtgttgccctacacctgggaactggaggtactggaggcaggctgtggtgagcttgaaagcaaaacacagagggcagtccaatctctttggccatatttcttctgcatatccaataccatgtccacaactctgctagtgtcctgatggtggtgggctctacacattcccgggaagctgaaggcagataatgaccaggacaggtcaacctctcttcttctgaaagccttcatctactaatggcctgggactcttcccttaaatgcttagattgtgtcttccactaaggttttttgctgttgctgttgtttgtttgtttgtttgtttgtttgtttgtttgttttgagacggaatctcactctgtcgcccaggctggagtgtagtggcacaatctcagctcaccacaaccttcacctcctaggttgaaggggttctcctgcctcagcctcctgtgtagctaggattacaggcacatgccaccatgcctggctaatttttgtatttttggtagagacaggatttcgccatgttggccaggctggtcttgaactcctgacctcaggtgatctgcctaccttggtctcccaaagtgctgggattacaggtgtgagccaccacacccggccaaggtttttgtttgtttgtttgtttgtttgtttgttttgtattgaggcagggtatcactctggtcacccaggctggagtgcagtagtgcaatcacggctcactgaaacctccacctccctggcgggctcaggtgatcctgccacctcagcttcccaggtagctgggactacaggcttgtaccaccactcccagctaatttttgcgtttttagtagagacagggtttccccatgttgcccaggttggtctcaaactctgggctcaagcgatctgcctgcctcagcctcccaaagtgctgggattacaggtgtaagccaccgtacccggccccgccactaaggttttgaaaatgaagcaattacaagtttaagtctattaataagtgatgaagccatgtagaaaagcagaataattatcttggatcaggaaggtcacatgaggatctacttgggggttgtcaatattctatttcttgacctgatcagtgttgacagcaggttttaattttttacttctttttgtttgtttgtttttgagacggagtcttgctctgtctcccaggctggagtgcagtggtatgatctcggctcactgcaacctccgcctcctgggttcaagctgttctcctgcctcagcctccccagtagctgggattacaggcaggcaccaccacgaccagctaatttttgtatttttagtagagactgggtttcaccatcttggccaggctggtctcgaacttctgatctcgtgatccgccctccttggcctcccaaagtgctgggattacaggcttgagccagcgtgcccggcccattttttacttccttattaaactgtacatataggccttgcacacttttctgcatcaatgttatattccacaataaagggaaaaggtatatacacaacttgataccagtaatgtgaaacatatatttctacatagaaaaaaaaatgactgaaatactgcactccaatgtgttcacacagtagttgtttctggattatttatatattaaatgtttatatattgtattatgccatgaggtttgtgttttctctccacttttctgcattttccaagtttactacaaagagcacatattactcttataatcagaaagtcataaaatatatttaaaaagacaaaattgaaactaataaggatcaacacaaaacagatgagccatctgtggaaatccgcacagaatactacctaaagagattggtgacgtgcatgatctcactaggatgagcacaaagcttgccagagcctagggtctatttctagggttggctcttggaagccaggatagttgttatctctgggaagagggaggggcacacaaggggcttctaaaacattctgaatgttctatttctgaacctggttggtgggtacatgactgttggttttattattatatgttttatatactcttccgtatgtatggtgtggattccaaaaaaagatttcctttagagaaaaccagaatcacataagtagaaaatatggtgctatgttgaaggaacaactcaagtttatataaaatcatcatcatttataggcttaaaaagttgctttggaattttggtctaactgacttgtcttttctgcagcaaaccacgctccttctggacgtgctccaggcagaggggattagggtgggttcaaggctgcaagtacctagctcagcacactctcttcaggggacttagagtttgtctggtgttggctctctgagctcttgtcaggaatgccgacccttccgaggttcaggatttgaagcctgccttcccaccccagatttggtccacacagacactcaagtatgtatttcaactacaaatgacctgtactttcctattactcctctctttcatggtaacctttctggtatccttccttccctacatttatgggagggggacatcattctctgctctcctgtcactgaaggctccaccttctgtcttcttctgacccatctggttttcctggggccacctcctctccttaccaccctaacgcttttgtaacttgaggagaaatgagagatcacctagtcaggtcatcattctctgtagatgaagaggcccaatggtttgctcaagaattgccaagcgagttaaagacagagagtatgagagtcagcaagacctacagaaagcatctatctgcactgttttgcagggacttagcctttgtgtgtggactcctggaatgccacccactaagaaacattgtctgacaccaactccccacttggtaggtggggacactgaaactcatggcaggaaagggccttgccccaagccagggcagagtgtcactcatcactctcaattttcagtccagggcaccttgttgtgactatcccaaaggcagccactttccctggtctgaaagacctgaagagagaagagaagagaaggatggaaggcagagtatgcggctttgattcatttcctggtgaaaacagatctatacgagaagcaaatttcacgaaagggaagagaagaaagtgtcccatacgttgctggcctgtttcaaccttgctttgattcttgctgaaaagggtaccgtgtatttctgagttcaacatgcagaccagtgttaggaaagccactgcacctccactttagcctccagggctgtgccctgcaaatggcctgcagccttggtgcctcgctctccagactgcattttggaagatgggacagaggcttatggaagcccacattagaacgggggagcagaatgggtgagatgagggatccttgatagtgaaccagatgaaggaatggtagccaaatgccaggcctcctttgtggcttcaatccaaaggctctggagcccttccagggcagaacatcaggcatgtttacccccactgtcctcaacagtgacagaggtgcaatcttgggcagctggccattttgaaagcaacctccttaatctcaactgggaaggctccctagcaggacccctgtgttgcacacctggaggaagctagactaaccagaagctcagcacggttccatctgggatgcccaggtctgagacgaaaaaggtaactctcttttctgggtcctggcccagttgtgtctctctccacctcattctctgagatgcctgtctccccttttttgtcccatcaggaggcaagagctatcactgggccagactccaccagaagccaagccagcttgttacccagcttctcagggagcaaagaacagccttgtttctatcttatccccactgtcccctgcccctgccccacctcccagccattcagcttctggcttccccagagctgcctgcttctttgtggtcctccattccttgaaaagaccttctagtcattagtgtatataaatggccacttagcccagattacagtgaggtcaacagctggggctctgagaattgtcacacactggcacaggagaggaggctattcttccagagaatttggagggcactcccatccacttacaacaaaaagcccatccactgtgcttggcagtaggtgatctgagaaccaatggaaccaggttaatcctgtggcactgttgagtgaggagagcagtggcgggcactggaaaatatcagagacaaggcaggagacctgaaatctaggcttagctcctcatatacttggcagctgtatgacctcagacaaccagtgttacctctctaagcctcagtttcctcatgcaaaaggagggggaataacaacagagcccactgcttgggggtgttgtgaggacaggatgaaaaaacaaacagaaatccctcagtacaggattcagtgcagtggacagtcttgcaaggtctggttcagccctccacccctaccctcaccagtataaagaactctggcctacaagtcagatgacctgagttttaatctcagctttgccattagccgtgtgaacttgagaaagtccctttcctttttacatctattgggatgatcatgcattttttgtcctttattctgttaatatagtgtgttacattgattgcttttcatagactgaaccagccttgtattccagggataaatctcacttggtcatggtgtataatcctttatacaaatgttgctgggttgagtttgctagtattttgttgaagatttttatgtcttgattcataaggaatattggtgtaccttccccttttatggccacagtttccctacaatgatgtagtcgaactagacaacctccaatatctttcagtattcatgtcctctgattctgtgaaactaagaaaattaagaaatagtgattcataggcacaaggcaggcaaaacttagactccttgtagaataattaggaagccaaatattcagtgtgcttatttctcaaataaccttagtttctccagtctgccccaactccgaggcctgaatatctctagatgcttatgatggcaactaaagcctaaaagctaattcattttaaagttcttccaaatgcatagggttttatttttccagacctgggttcagatggggaatttgacaaacaatggaaagggggaaaaacaacaatctaaacactgagtgacaaagtaacaaagaaatagtctagctatcagccagtcaagccagccttggctttgctatccaaagtagtcagtctaattctaccaccagtttctgttcctgtagctgtctactgcctgccagggactctgccttcccacccacaactaccaatggaaggatgtggtgaccataccagtggctgctgacatctcctgccatgggaagcataattgcctccagcagcctcccccttagatccatcatttttgttgcacttggcctgggctgtactcccggccaatgactgaacatggtgagcatagtaatgcaggcccatttctgtgaggagcaggactcctccagtaggtgactttggctcaaggactctctattggcctggttgaacttttcctgaactgtgctactgtctgagactcttcttacccaatcctctttctcgccccaattgtcacagaccacctgcattgtggtctgagtctctccccaccttctcttgctcttccctgtttatctttcacaggcatttcccccagtacattccttgaatgtctaacccgatacgggtgcctgacttttggcagacctaagcagacaaaaaggagtacttggttacctagctcttctttctaccacaaacatcgagggaaccctttttccctcacccctctgccacacccccactgccccagtgaacaaccacagagagagctgtggtataatattaggctggtgcaaaagtaattgcggtttttgccattacttttaatggtaaaaaccgcaattacttttgcacctacctagtatttgtgtccccccaaattcatatgttgaaacctaacccacaatatgatgtcattaggaggcaagaccttgaggaggtgattagatgatggggtggagctctcctgaatgagattagtgcccttataagaagaagcccaaggaagctaccttgactcttccatcacatgagaatgcagcaagaaggcaccatctactaatcaggaagagagctctcaccagacactgaatctgccagtgtcttgatcttgaagttcccagcctccagaactatgcataatgcatttccattgtctctaagccacccagcctatggtattttgtcatagcagcctgaactgactaagacagtgagccacatgagaagtgccccaacccctcccttaagcacttggctcacagatcagtgggttcatttctgcctgagttttattgttattctgtagatttcttgggctagatatatttttctgttattttccttcttcacctcagtcatgaattggttgttttaaaaaagacaatgtaagtcatggggaaactcctgacaactctactctcctagggttcctgataaaaggggattcagttgagtcctctgatggtctctacctgccaaagtccagcagcccttagcaaacatgctgctcgtttctgtagagaaggtgctggtgtcccaccatacttctctctccctcatgaagggcttgcgacccagcaaatgggtggcttatatgggtctgtttcaaaggaagagccagctctgggaagaaaaacgatgagcataagcataacctaccactgtgcctgggaaagcagacaacttttttgatgtgtgaatatctaatgagaatggaatccatcaattaccttaaacttaggcacagtcttcaaattcaatatatgtgggatatacttttagtcagtttgtagacgttatttgtaataaataatctggcttctctaaagaaattattttaagtgtttggtttggtttgatttaatggtaaaattatatttagtggcagagaattatagcaatggtgataaactatagagtgtcataagttcatatcttattctcacatttgaagctgcctgcagatgcattcaagatgcagccagaagtcaggagactcaggctgttatttggagctcatcattttacagccttgctggactcccactttctcaggggaaaaatgtggtgttgacccagattagctctccaggccctgctgagttgggcactctgtaagctggagggtcttctattgtcttcacctaagtgtcaatcaacaacccaaatgggcatgggggaagagggagctgggccaatgcccagggtgcctggtagagagataccttgggcactggaaggcaccagcttcccagagagaagggggagggccatgaaaaagttggctgtagatgccagggacactgggactctccagctgtgtgtttgtgtcttctgaagacttatgtttcattcctttggagcatgcataatcatacactgtgggatgtgttatatagattgcttgatagttcaccactgtaataaaatactgtgactggaatctgctcccagtctgcctttgatagcacttgtgcaacacacatttactgagcatttacagtgatccaggacctgtgttgtgaaaacattgatggacaaggcagatggtggagcacgtcagtgaggatttttaacaaaggctggtaagtgctataaaggaacattgtaggacactagagaacaaagaacaggagaacctgacttaggctggggtggggcgttggttagaggaggctccttggaggacatgaggtttaagctgtgacctgaggatgaatagatgttggccaggtgaggtaccggtatttgtcagccttaccagtaaaaaagaaaacctattaaaaaaaaaatacacatacaaagcctcatcagccatggcttaccagagaaagtacagcgggcacacaaaccacaagctctaaagtcactctccaacctctccacaatatatatacacaagccctaaactgacgtaatgggactaaagtgtaaaaaatcccgccaaacccaacacacaccccgaaactgcgtcaccagggaaaagtacagtttcacttccgcaatcccaacaagcgtcacttcctctttctcacggtacgtcacatcccattaacttacaacgtcattttcccacggccgcgccgccccttttaaccgttaaccccacagccaatcaccacacggcccacactttttaaaatcacctcatttacatattggcaccattccatctataaggtatattattgatgatg

SEQ ID NO: 306-319 - skipped (14 entries)

SEQ ID NO: 320 - DNA, 348 bp, Artificial Sequence
  SV40 promoter
ggtgtggaaagtccccaggctccccagcaggcagaagtatgcaaagcatgcatctcaattagtcagcaaccaggtgtggaaagtccccaggctccccagcaggcagaagtatgcaaagcatgcatctcaattagtcagcaaccatagtcccgcccctaactccgcccatcccgcccctaactccgcccagttccgcccattctccgccccatggctgactaattttttttatttatgcagaggccgaggccgcctctgcctctgagctattccagaagtagtgaggaggcttttttggaggcctaggcttttgcaaaaagctcccgggagcttgtatatccattttcg

SEQ ID NO: 321 - DNA, 206 bp, Artificial Sequence
  dESV40 promoter
gcatgcatctcaattagtcagcaaccatagtcccgcccctaactccgcccatcccgcccctaactccgcccagttccgcccattctccgccccatggctgactaattttttttatttatgcagaggccgaggccgcctcggcctctgagctattccagaagtagtgaggaggcttttttggaggcctaggcttttgcaaaaagctt

SEQ ID NO: 322 - DNA, 463 bp, Homo sapiens
ttggcccctccctcgggttaccccacagcctaggccgattcgacctctctccgctggggccctcgctggcgtccctgcaccctgggagcgcgagcggcgcgcgggcggggaagcgcggcccagacccccgggtccgcccggagcagctgcgctgtcggggccaggccgggctcccagtggattcgcgggcacagacgcccaggaccgcgctccccacgtggcggagggactggggacccgggcacccgtcctgccccttcaccttccagctccgcctcctccgcgcggaccccgccccgtcccgacccctcccgggtccccggcccagccccctccgggccctcccagcccctccccttcctttaccgcggccccgccctctcctcgcggcgcgagtttcaggcagcgctgcgtcctgctgcgcacgtgggaagccctggccccggccacccccgccagatct

SEQ ID NO: 323 - DNA, 648 bp, Schmidt-Ruppin A strain
acgcgtcatgtttgacagcttatcatcgcagatccgtatggtgcactctcagtacaatctgctctgatgccgcatagttaagccagtatctgctccctgcttgtgtgttggaggtcgctgagtagtgcgcgagcaaaatttaagctacaacaaggcaaggcttgaccgacaattgcatgaagaatctgcttagggttaggcgttttgcgctgcttcgcgatgtacgggccagatattcgcgtatctgaggggactagggtgtgtttaggcgaaaagcggggcttcggttgtacgcggttaggagtcccctcaggatatagtagtttcgcttttgcatagggagggggaaatgtagtcttatgcaatactcttgtagtcttgcaacatggtaacgatgagttagcaacatgccttacaaggagagaaaaagcaccgtgcatgccgattggtggaagtaaggtggtacgatcgtgccttattaggaaggcaacagacgggtctgacatggattggacgaaccactaaattccgcattgcagagatattgtatttaagtgcctagctcgatacaataaacgccatttgaccattcaccacattggtgtgcacctccaagctgggtaccagctgctagcaagcttgagatct

SEQ ID NO: 324 - DNA, 1740 bp, Homo sapiens
gagtagctgggattacaggcatgtgccaccacgcctcgctaatattagtatttttcatacagacaagatctcactatgttgctcagggtagtctcgaattctgggactcaaatgatcctcccacttcagcctcccaaagtgctgggattacaggcataagccatcatgcccggcctctgacgctgtttctttcaacccccaggatttcagattccaccagcttatggagaagggaaccaagttcgagatgcgtgattgcccagaaagttggaggctgagctgagacttgaacccagagaccagaacctccagaggtcaaagtcctcctcctgggtcccccagagaagggccctgagatgacagctcgttggtcctcatggaagcgtgacccccccagtagactttctcccacacccaaccttggtttcctcatctatatgatagggacaagccagactctacctccctggtggtcatggtctccgcttattcgggttcataaccttaaaggcccctcgcaccacctcagtgagccatttatgcctggcacagggccaactctcagtgcatatctgcaaaggaaccaatgaatgagtgaatgaagtgacaaatgaataaaggaataaatgaatgaggcacttatcatgtaccaggctttcgttaccacgtcccatttattcctctgaggcagggtctattttatccttgttacagatggggaaactaaggcccagggaggagcaaagtcttccccaagtatgtacccactcagaacttgagctctgaatgtctcccacccagcttagcccaagagcggggttcagtgatgcccaccccctaaggctctagagaaagggggtaggcccacatgccagtttgggggtggtaaagccaggtaagttttctttatgggtcccctgaaaccctgaaagtgaaccccagtcctgcatgaaagtgagctccccatagctcaaggtattcaagcacaatacggctttgagtgctgaagcaggctgtgcaggcttggatagtgacatgccctctctgagcctcaatttccccacctgtcaacagcagacagtgacagctgtgatcaggggatcacagtgcatggggatgggtgggtgcatggggatggaggggcatttgggagccctccccgataccaccccctgcagccacccagatagcctgtcctggcctgtctgtcccagtccagggctgaaagggtgcgggtcctgcccgcccctaggtctggaggcggagtcgcggtgacccgggagcccaataaatctgcaacccacaatcacgagctgctcccgtaagccccaaggcgacctccagctgtcagcgctgagcacagcgcccagggagagggacagacagccggctgcatgggacagcggaacccagagtgagaggggaggtggcaggacagacagacagcaggggcggacgcagagacagacagcggggacagggaggccgacacggacatcgacagcccatagattcctaacccagggagccccggcccctctcgccgcttcccaccccagacggagcggggacaggctgccgagcatcctcccacccgccctccccgtcctgcctcctcggcccctgccagcttcccccgcttgagcacgcagggcgtccgaggacgcgctgggcctccgcacccgccctcatggaggccgtggagaccggggaacggcccaccttcggagcctgggacta

SEQ ID NO: 325 - DNA, 1075 bp, Homo sapiens
attagagattgtaaattgggctctgagcttcctaccaacaaaagcacaaaggaaaatatgatcactggtattaaaaaaaaacacctatggtttccaaaagattaaaacaaaccagcagttttatagaagctaacactaaaatctaaaggaactacgttctatggagccacttaatatggataaacactttgacaatattctttcaacaactacagtaacaagtttcttagagtccatttctttttacatccataatgaattgtaaatcttttctacttcttaagtaaaacatcaccacttaattctggtaacttttccatattaactttttagaacaattgcaaacgtaccataaatgattgttgtcacagtggtaactatttgaccctgactgttattttgtatatagcagcttttaaaataaaaaggcaacaagtttctaggcgtaatttccacagatcttttatgtaaaacaatgacatcctttgcaacttctgccatttaatctatctcaagcaagctctctggaaacaaatctatttgaaagattctattgtaattagaaatcagggtaactgaatgcactagatgaaaaccttctgactggggccaatgaagtcaataaagtcaaaactgctgtgaatgctcaactgtctgcagatcagatgtcttgggatggaatccgttctcgaggccaccatcattaatatcaatttggccatgtaatacaagcctcacttgttccactgttacaaatgtgcttaaaactgagctcatttacaatccaaatacatatgtaggatggtaaccaaggcatcacactaatttaggtattatgttttagggggaacaaaaggtatgttaatattttattcatctccaaattaactataaattgtgcattcttgcatagatcctccttgggaatgagaaattaggaaaatccagttgttaaaatgaatgcctaaaatcaaaataaaatttgtttttctggcacctgcttgatgacacagactaataaccaatgacaaaattcccttgaacccaagttttcatttcctcctattgtgtggtc
